(19) United States
(12) Patent Application Publication
(10) Pub. No.: US 2025/0179533 A1
(43) Pub. Date: Jun. 5, 2025

(54) RETROVIRAL-LIKE PARTICLE-REDUCED CHINESE HAMSTER OVARY PRODUCTION CELL LINES

(71) Applicant: GENENTECH, INC., South San Francisco, CA (US)

(72) Inventors: Zion Lee, South San Francisco, CA (US); Amy Shen, South San Francisco, CA (US); Gavin Christian Barnard, South San Francisco, CA (US); Qi Chen, South San Francisco, CA (US); Hua Wang, South San Francisco, CA (US); Bin Yang, South San Francisco, CA (US); Min Zhang, South San Francisco, CA (US)

(73) Assignee: GENENTECH, INC., South San Francisco, CA (US)

(21) Appl. No.: 18/919,812

(22) Filed: Oct. 18, 2024

Related U.S. Application Data
(60) Provisional application No. 63/544,782, filed on Oct. 18, 2023.

(51) Int. Cl. C12N 15/90; C07K 16/18; C07K 16/22; C07K 16/24; C07K 16/28; C07K 16/32; C07K 16/40; C07K 16/42; C12N 9/22; C12N 15/11

(52) U.S. Cl. CPC C12N 15/907; C07K 16/18; C07K 16/22; C07K 16/244; C07K 16/249; C07K 16/2803; C07K 16/2809; C07K 16/2812; C07K 16/2827; C07K 16/2839; C07K 16/2845; C07K 16/2863; C07K 16/2875; C07K 16/2878; C07K 16/2887; C07K 16/32; C07K 16/40; C07K 16/4291; C12N 9/22; C12N 15/11; C12N 2310/20

(57) ABSTRACT

The presently disclosed subject matter relates to retroviral-like particle (RVLP)-reduced Chinese hamster ovary (CHO) cells suitable to produce recombinant proteins, as well as methods of producing and using such RVLP-reduced CHO production cells.

### CROSS-REFERENCE TO RELATED APPLICATIONS

[0001] This application claims priority to U.S. Provisional Application No. 63/544,782, filed Oct. 18, 2023, the contents of which are incorporated by reference herein in their entireties and to which priority is claimed.

### SEQUENCE LISTING

[0002] The present specification makes reference to a Sequence Listing (submitted electronically as a xml file named “00B206_1462_SL.xml” on Oct. 18, 2024). The 00B206_1462_SL.xml file was generated on Oct. 17, 2024, and is 6,639,945 bytes in size. The entire contents of the Sequence Listing are hereby incorporated by reference.

### TECHNICAL FIELD

[0003] The presently disclosed subject matter relates to retroviral-like particle (RVLP)-reduced Chinese hamster ovary (CHO) cells suitable to produce recombinant proteins, as well as methods of producing and using such RVLP-reduced CHO production cells.

### BACKGROUND

[0004] Due to the rapid advancement in cell biology and immunology, there has been an increasing demand to develop novel therapeutic recombinant proteins for a variety of diseases including cancer, cardiovascular diseases and metabolic diseases. These biopharmaceutical candidates are commonly manufactured by commercial cell lines capable of expressing the proteins of interest. For example, CHO cells have been widely adopted for the production of monoclonal antibodies.

[0005] That CHO cells are a preferred mammalian expression system for biomanufacturing is due, in part, to their safety profile relative to other mammalian expression systems. Not only are CHO cells less susceptible to certain viral infections relative to other mammalian cells, but studies have repeatedly found CHO cells unable to produce infective viral-like particles (VLPs), e.g., infective RVLPs, capable of replicating in human cells. CHO cells do, however, produce VLPs and such VLPs have been identified both intracellularly and extracellularly in cell culture media. Because such VLPs, e.g., RVLPs, are believed to result from the presence of endogenous retroviruses (ERVs), as opposed to newly acquired retroviral infections, there remains a need in the art for RVLP-reduced CHO cells suitable to facilitate the commercial production of recombinant proteins.

### SUMMARY OF THE INVENTION

[0006] The presently disclosed subject matter relates, in certain embodiments, to modified CHO cells where, prior to the modification, the CHO cells comprise two or more ERV loci selected from:
[0007] (a) CHERV-1b (Genbank Accession No. MN527960, SEQ ID NO. 8);
[0008] (b) CHERV-2g (Genbank Accession No. MN527961, SEQ ID NO. 9);
[0009] (c) ETC109F (30021-39247 of SEQ ID NO. 10);
[0010] (d) CHERV-3g (Genbank Accession No. MN527962, SEQ ID NO. 11); and
[0011] (e) an ERV locus comprising a sequence having at least 90% identity to any one of (a)-(d), where the modification comprises inactivation of two or more of the ERV loci of (a)-(e) present in the CHO cell prior to such modification. In certain embodiments, inactivation of the two or more of the ERV loci of (a)-(e) comprises a knock-out of the respective ERV GAG coding sequence. For example, but not by way of limitation, the knock-out of the respective ERV GAG coding sequence can comprise introduction of an indel into the ERV GAG coding sequence. In certain non-limiting embodiments, the knock-out of the respective ERV GAG coding sequence can comprise introduction of a base edit into the ERV GAG coding sequence. In certain non-limiting embodiments, the knock-out of the respective ERV GAG coding sequence can comprise introduction of a deletion flanking the ERV GAG coding sequence.

[0012] In certain embodiments, the presently disclosed subject matter is directed to modified CHO cells where, prior to the modification, the CHO cells comprise two or more ERV loci selected from:
[0013] (a) CHERV-1b (Genbank Accession No. MN527960, SEQ ID NO. 8);
[0014] (b) CHERV-2g (Genbank Accession No. MN527961, SEQ ID NO. 9);
[0015] (c) ETC109F (30021-39247 of SEQ ID NO. SEQ ID NO. 10);
[0016] (d) CHERV-3g (Genbank Accession No. MN527962, SEQ ID NO. 11); and
[0017] (e) an ERV locus comprising a sequence having at least 90% identity to any one of (a)-(d), where the modification comprises inactivation of two or more of the ERV loci of (a)-(e) present in the CHO cell prior to such modification, and wherein the modified cell expresses a recombinant product of interest. In certain embodiments, the modified cell is generated from a recombinant cell that expresses a recombinant product of interest. In certain embodiments, the recombinant product of interest comprises a recombinant protein. In certain embodiments, the recombinant protein is antibody or an antigen-binding fragment thereof. In certain embodiments, the antibody is a multispecific antibody or an antigen-binding fragment thereof. In certain embodiments, the antibody consists of a single heavy chain sequence and a single light chain sequence or antigen-binding fragments thereof. In certain embodiments, the antibody is a chimeric antibody, a human antibody or a humanized antibody. In certain embodiments, the antibody is a monoclonal antibody.

[0018] In certain embodiments, the recombinant product of interest expressed by a modified CHO cell of the present disclosure is encoded by an exogenous nucleic acid sequence integrated at one or more targeted locations in the cellular genome of the modified CHO cell. In certain embodiments, the targeted location is at least about 90% homologous to a sequence of a portion of the contig sequence of one of the contigs NW_006874047.1, NW_006884592.1, NW_006881296.1, NW_003616412.1, NW_003615063.1, NW_006882936.1, and NW_003615411.1, or to a sequence selected from SEQ ID Nos. 1-7.

[0019] In certain embodiments, the modified CHO cell of the present disclosure comprises gene knock-outs selected from: a) BAX; BAK; ICAM-1; GGTA1; CMAH; LPL; LPLA2; and PPT1; b) BAX; BAK; ICAM-1; SIRT-1; GGTA1; CMAH; LPL, LPLA2; and PPT1; c) BAX; BAK; ICAM-1; SIRT-1; MYC; GGTA1; CMAH; LPL; LPLA2; and PPT1; d) BAX; BAK; ICAM-1; SIRT-1; MYC; GGTA1; CMAH; LPL, LPLA2; PPT1; and LIPA; e) BAX; BAK; ICAM-1; GGTA1; CMAH; LPLA2; PPT1; and LIPA; f) BAX; BAK; ICAM-1; SIRT-1; GGTA1; CMAH; LPLA2; PPT1; and LIPA; g) BAX; BAK; ICAM-1; SIRT-1; MYC; GGTA1; CMAH; LPLA2; PPT1; and LIPA; h) BAX; BAK; ICAM-1; LPL; LPLA2; and PPT1; i) BAX; BAK; ICAM-1; SIRT-1; LPL, LPLA2; and PPT1; j) BAX; BAK; ICAM-1; SIRT-1; MYC; LPL; LPLA2; and PPT1; k) BAX; BAK; ICAM-1; SIRT-1; MYC; LPL; LPLA2; PPT1; and LIPA; 1) BAX; BAK; ICAM-1; SIRT-1; and MYC; m) BAX; BAK; ICAM-1; PERK; SIRT-1; and MYC; n) BAX; BAK; ICAM-1; SIRT-1; PERK; MYC; GGTA1; CMAH; LPL, LPLA2; PPT1; and LIPA; o) BAX; BAK; LPL; LPLA2; GGTA1; and CMAH; p) BAX; BAK; PERK; LPL; LPLA2; GGTA1; and CMAH; q) BAX; BAK; MYC; LPL; LPLA2; GGTA1; and CMAH; r) BAX; BAK; MYC; PERK; LPL; LPLA2; GGTA1; and CMAH; s) BAX; BAK; LPL; LPLA2; GGTA1; CMAH; and PPT1; t) BAX; BAK; PERK; LPL; LPLA2; GGTA1; CMAH; and PPT1; u) BAX; BAK; MYC; LPL; LPLA2; GGTA1; CMAH; and PPT1; v) BAX; BAK; MYC; PERK; LPL; LPLA2; GGTA1; CMAH; and PPT1; w) BAX; BAK; ICAM-1; and SIRT-1; x) BAX; BAK; and ICAM-1; y) BAX; BAK; BCKDHA; ICAM-1; GGTA1; CMAH; LPL; LPLA2; and PPT1; z) BAX; BAK; BCKDHA; ICAM-1; SIRT-1; GGTA1; CMAH; LPL; LPLA2; and PPT1; aa) BAX; BAK; BCKDHA; ICAM-1; SIRT-1; MYC; GGTA1; CMAH; LPL; LPLA2; and PPT1; bb) BAX; BAK; BCKDHA; ICAM-1; SIRT-1; MYC; GGTA1; CMAH; LPL, LPLA2; PPT1; and LIPA; cc) BAX; BAK; BCKDHA; ICAM-1; GGTA1; CMAH; LPLA2; PPT1; and LIPA; dd) BAX; BAK; BCKDHA; ICAM-1; SIRT-1; GGTA1; CMAH; LPLA2; PPT1; and LIPA; ee) BAX; BAK; BCKDHA; ICAM-1; SIRT-1; MYC; GGTA1; CMAH; LPLA2; PPT1; and LIPA; ff) BAX; BAK; BCKDHA; ICAM-1; LPL; LPLA2; and PPT1; gg) BAX; BAK; BCKDHA; ICAM-1; SIRT-1; LPL, LPLA2; and PPT1; hh) BAX; BAK; BCKDHA; ICAM-1; SIRT-1; MYC; LPL; LPLA2; and PPT1; ii) BAX; BAK; BCKDHA; ICAM-1; SIRT-1; MYC; LPL; LPLA2; PPT1; and LIPA; jj) BAX; BAK; BCKDHA; ICAM-1; SIRT-1; and MYC; kk) BAX; BAK; BCKDHA; ICAM-1; PERK; SIRT-1; and MYC; 11) BAX; BAK; BCKDHA; ICAM-1; PERK; SIRT-1; MYC; GGTA1; CMAH; LPL, LPLA2; PPT1; and LIPA; mm) BAX; BAK; BCKDHA; LPL; LPLA2; GGTA1; and CMAH; nn) BAX; BAK; BCKDHA; PERK; LPL; LPLA2; GGTA1; and CMAH; oo) BAX; BAK; BCKDHA; MYC; LPL; LPLA2; GGTA1; and CMAH; pp) BAX; BAK; BCKDHA; MYC; PERK; LPL; LPLA2; GGTA1; and CMAH; qq) BAX; BAK; BCKDHA; LPL; LPLA2; GGTA1; CMAH; and PPT1; rr) BAX; BAK; BCKDHA; PERK; LPL; LPLA2; GGTA1; CMAH; and PPT1; ss) BAX; BAK; BCKDHA; MYC; LPL; LPLA2; GGTA1; CMAH; and PPT1; tt) BAX; BAK; BCKDHA; MYC; PERK; LPL; LPLA2; GGTA1; CMAH; and PPT1; uu) BAX; BAK; BCKDHA; ICAM-1; and SIRT-1; vv) BAX; BAK; BCKDHA; and ICAM-1; ww) BAX; BAK; BCKDHB; ICAM-1; GGTA1; CMAH; LPL; LPLA2; and PPT1; xx) BAX; BAK; BCKDHB; ICAM-1; SIRT-1; GGTA1; CMAH; LPL; LPLA2; and PPT1; yy) BAX; BAK; BCKDHB; ICAM-1; SIRT-1; MYC; GGTA1; CMAH; LPL; LPLA2; and PPT1; zz) BAX; BAK; BCKDHB; ICAM-1; SIRT-1; MYC; GGTA1; CMAH; LPL, LPLA2; PPT1; and LIPA; aaa) BAX; BAK; BCKDHB; ICAM-1; GGTA1; CMAH; LPLA2; PPT1; and LIPA; bbb) BAX; BAK; BCKDHB; ICAM-1; SIRT-1; GGTA1; CMAH; LPLA2; PPT1; and LIPA; ccc) BAX; BAK; BCKDHB; ICAM-1; SIRT-1; MYC; GGTA1; CMAH; LPLA2; PPT1; and LIPA; ddd) BAX; BAK; BCKDHB; ICAM-1; LPL; LPLA2; and PPT1; eee) BAX; BAK; BCKDHB; ICAM-1; SIRT-1; LPL, LPLA2; and PPT1; fff) BAX; BAK; BCKDHB; ICAM-1; SIRT-1; MYC; LPL; LPLA2; and PPT1; ggg) BAX; BAK; BCKDHB; ICAM-1; SIRT-1; MYC; LPL; LPLA2; PPT1; and LIPA; hhh) BAX; BAK; BCKDHB; ICAM-1; SIRT-1; and MYC; iii) BAX; BAK; BCKDHB; ICAM-1; PERK; SIRT-1; and MYC; jjj) BAX; BAK; BCKDHB; ICAM-1; PERK; SIRT-1; MYC; GGTA1; CMAH; LPL, LPLA2; PPT1; and LIPA; kkk) BAX; BAK; BCKDHB; LPL; LPLA2; GGTA1; and CMAH; 111) BAX; BAK; BCKDHB; PERK; LPL; LPLA2; GGTA1; and CMAH; mmm) BAX; BAK; BCKDHB; MYC; LPL; LPLA2; GGTA1; and CMAH; nnn) BAX; BAK; BCKDHB; MYC; PERK; LPL; LPLA2; GGTA1; and CMAH; ooo) BAX; BAK; BCKDHB; LPL; LPLA2; GGTA1; CMAH; and PPT1; ppp) BAX; BAK; BCKDHB; PERK; LPL; LPLA2; GGTA1; CMAH; and PPT1; qqq) BAX; BAK; BCKDHB; MYC; LPL; LPLA2; GGTA1; CMAH; and PPT1; rrr) BAX; BAK; BCKDHB; MYC; PERK; LPL; LPLA2; GGTA1; CMAH; and PPT1; sss) BAX; BAK; BCKDHB; ICAM-1; and SIRT-1; ttt) BAX; BAK; BCKDHB; and ICAM-1; uuu) BAX; BAK; BCKDHA; BCKDHB; ICAM-1; GGTA1; CMAH; LPL; LPLA2; and PPT1; vvv) BAX; BAK; BCKDHA; BCKDHB; ICAM-1; SIRT-1; GGTA1; CMAH; LPL; LPLA2; and PPT1; www) BAX; BAK; BCKDHA; BCKDHB; ICAM-1; SIRT-1; MYC; GGTA1; CMAH; LPL; LPLA2; and PPT1; xxx) BAX; BAK; BCKDHA; BCKDHB; ICAM-1; SIRT-1; MYC; GGTA1; CMAH; LPL, LPLA2; PPT1; and LIPA; yyy) BAX; BAK; BCKDHA; BCKDHB; ICAM-1; GGTA1; CMAH; LPLA2; PPT1; and LIPA; zzz) BAX; BAK; BCKDHA; BCKDHB; ICAM-1; SIRT-1; GGTA1; CMAH; LPLA2; PPT1; and LIPA; aaaa) BAX; BAK; BCKDHA; BCKDHB; ICAM-1; SIRT-1; MYC; GGTA1; CMAH; LPLA2; PPT1; and LIPA; bbbb) BAX; BAK; BCKDHA; BCKDHB; ICAM-1; LPL; LPLA2; and PPT1; cccc) BAX; BAK; BCKDHA; BCKDHB; ICAM-1; SIRT-1; LPL, LPLA2; and PPT1; dddd) BAX; BAK; BCKDHA; BCKDHB; ICAM-1; SIRT-1; MYC; LPL; LPLA2; and PPT1; eeee) BAX; BAK; BCKDHA; BCKDHB; ICAM-1; SIRT-1; MYC; LPL; LPLA2; PPT1; and LIPA; ffff) BAX; BAK; BCKDHA; BCKDHB; ICAM-1; SIRT-1; and MYC; gggg) BAX; BAK; BCKDHA; BCKDHB; ICAM-1; PERK; SIRT-1; and MYC; hhhh) BAX; BAK; BCKDHA; BCKDHB; ICAM-1; PERK; SIRT-1; MYC; GGTA1; CMAH; LPL, LPLA2; PPT1; and LIPA; iiii) BAX; BAK; BCKDHA; BCKDHB; LPL; LPLA2; GGTA1; and CMAH; jjjj) BAX; BAK; BCKDHA; BCKDHB; PERK; LPL; LPLA2; GGTA1; and CMAH; kkkk) BAX; BAK; BCKDHA; BCKDHB; MYC; LPL; LPLA2; GGTA1; and CMAH; llll) BAX; BAK; BCKDHA; BCKDHB; MYC; PERK; LPL; LPLA2; GGTA1; and CMAH; mmmm) BAX; BAK; BCKDHA; BCKDHB; LPL; LPLA2; GGTA1; CMAH; and PPT1; nnnn) BAX; BAK; BCKDHA; BCKDHB; PERK; LPL; LPLA2; GGTA1; CMAH; and PPT1; oooo) BAX; BAK; BCKDHA; BCKDHB; MYC; LPL; LPLA2; GGTA1; CMAH; and PPT1; pppp) BAX; BAK; BCKDHA; BCKDHB; MYC; PERK; LPL; LPLA2; GGTA1; CMAH; and PPT1; qqqq) BAX; BAK; BCKDHA; BCKDHB; ICAM-1; and SIRT-1; or rrrr) BAX; BAK; BCKDHA; BCKDHB; and ICAM-1.

[0020] In certain embodiments, the present disclosure is directed to compositions comprising a modified CHO cell as disclosed herein.

[0021] In certain embodiments, the present disclosure is directed to methods of producing a recombinant product of interest comprising:
[0022] a) culturing a modified CHO cell of the present disclosure; and
[0023] b) recovering the recombinant product of interest from the cultivation medium or the modified CHO cells.

[0024] In certain embodiments, the methods of producing a recombinant product of interest of the present disclosure comprise purifying the recombinant product of interest, harvesting the recombinant product of interest, and/or formulating the recombinant product of interest.

[0025] In certain embodiments, the present disclosure is directed to methods of producing a modified CHO cell, comprising:
[0026] (a) contacting the cell with a nuclease-assisted gene targeting system and/or nucleic acid targeting at least two endogenous ERVs selected from
   [0027] (i) CHERV-1b (Genbank Accession No. MN527960, SEQ ID NO. 8);
   [0028] (ii) CHERV-2g (Genbank Accession No. MN527961, SEQ ID NO. 9);
   [0029] (iii) ETC109F (30021-39247 of SEQ ID NO. 10);
   [0030] (iv) CHERV-3g (Genbank Accession No. MN527962, SEQ ID NO. 11); and
   [0031] (v) an ERV locus comprising a sequence having at least 90% identity to any one of (i)-(iv), and
   [0032] (b) selecting the modified CHO cell wherein the expression of said ERVs has been reduced or eliminated as compared to an unmodified CHO cell.

[0033] In certain embodiments, the methods of producing a modified CHO cell of the present disclosure comprise introducing an exogenous nucleic acid encoding a recombinant product of interest is into the CHO cell after the modification where the expression of said ERVs is reduced or eliminated as compared to an unmodified CHO cell. In certain embodiments, the methods of producing a modified CHO cell of the present disclosure comprise introducing an exogenous nucleic acid encoding a recombinant product of interest is into the CHO cell prior to the modification where the expression of said ERVs is reduced or eliminated as compared to an unmodified CHO cell.

[0034] In certain embodiments, the exogenous nucleic acid encoding a recombinant product of interest introduced into the modified cell of the present disclosure, either prior to or after said modification, is integrated in the cellular genome of the CHO cell at one or more targeted locations. In certain embodiments, the targeted location is at least about 90% homologous to a sequence of a portion of the contig sequence of one of the contigs NW_006874047.1, NW_006884592.1, NW_006881296.1, NW_003616412.1, NW_003615063.1, NW_006882936.1, and NW_003615411.1 or to a sequence selected from SEQ ID Nos. 1-7.

[0035] In certain embodiments, the exogenous nucleic acid encoding a recombinant product of interest introduced into the modified cell of the present disclosure, either prior to or after said modification, is randomly integrated in the cellular genome of the modified CHO cells.

[0036] In certain embodiments, the recombinant product of interest encoded by the exogenous nucleic acid encoding introduced into the modified cell of the present disclosure, either prior to or after said modification, comprises a recombinant protein. In certain embodiments, the recombinant protein is an antibody or an antigen-binding fragment thereof. In certain embodiments, antibody is a multispecific antibody or an antigen-binding fragment thereof. In certain embodiments, the antibody consists of a single heavy chain sequence and a single light chain sequence or antigen-binding fragments thereof. In certain embodiments, the antibody is a chimeric antibody, a human antibody or a humanized antibody. In certain embodiments, the antibody is a monoclonal antibody.

[0037] In certain embodiments, the nucleic acid sequence encoding the recombinant product of interest introduced into the modified cell of the present disclosure, either prior to or after said modification, is introduced using a transposase-mediated gene integration system.

[0038] In certain embodiments, the nuclease-assisted gene targeting system employed for the reduction of ERV expression in the modified CHO cells of the present disclosure is selected from the group consisting of CRISPR/Cas9, CRISPR/Cpf1, zinc-finger nuclease, TALEN or meganuclease.

[0039] In certain embodiments, the reduction of ERV expression in the modified CHO cells of the present disclosure is mediated by RNA silencing. In certain embodiments, the RNA silencing is selected from the group consisting of siRNA gene targeting and knock-down, shRNA gene targeting and knock-down, and miRNA gene targeting and knock-down.

[0040] In certain embodiments, the methods of producing a modified CHO cell of the present disclosure comprise use of a CHO cells comprising gene knock-outs selected from: a) BAX; BAK; ICAM-1; GGTA1; CMAH; LPL; LPLA2; and PPT1; b) BAX; BAK; ICAM-1; SIRT-1; GGTA1; CMAH; LPL, LPLA2; and PPT1; c) BAX; BAK; ICAM-1; SIRT-1; MYC; GGTA1; CMAH; LPL; LPLA2; and PPT1; d) BAX; BAK; ICAM-1; SIRT-1; MYC; GGTA1; CMAH; LPL, LPLA2; PPT1; and LIPA; e) BAX; BAK; ICAM-1; GGTA1; CMAH; LPLA2; PPT1; and LIPA; f) BAX; BAK; ICAM-1; SIRT-1; GGTA1; CMAH; LPLA2; PPT1; and LIPA; g) BAX; BAK; ICAM-1; SIRT-1; MYC; GGTA1; CMAH; LPLA2; PPT1; and LIPA; h) BAX; BAK; ICAM-1; LPL; LPLA2; and PPT1; i) BAX; BAK; ICAM-1; SIRT-1; LPL, LPLA2; and PPT1; j) BAX; BAK; ICAM-1; SIRT-1; MYC; LPL; LPLA2; and PPT1; k) BAX; BAK; ICAM-1; SIRT-1; MYC; LPL; LPLA2; PPT1; and LIPA; 1) BAX; BAK; ICAM-1; SIRT-1; and MYC; m) BAX; BAK; ICAM-1; PERK; SIRT-1; and MYC; n) BAX; BAK; ICAM-1; SIRT-1; PERK; MYC; GGTA1; CMAH; LPL, LPLA2; PPT1; and LIPA; o) BAX; BAK; LPL; LPLA2; GGTA1; and CMAH; p) BAX; BAK; PERK; LPL; LPLA2; GGTA1; and CMAH; q) BAX; BAK; MYC; LPL; LPLA2; GGTA1; and CMAH; r) BAX; BAK; MYC; PERK; LPL; LPLA2; GGTA1; and CMAH; s) BAX; BAK; LPL; LPLA2; GGTA1; CMAH; and PPT1; t) BAX; BAK; PERK; LPL; LPLA2; GGTA1; CMAH; and PPT1; u) BAX; BAK; MYC; LPL; LPLA2; GGTA1; CMAH; and PPT1; v) BAX; BAK; MYC; PERK; LPL; LPLA2; GGTA1; CMAH; and PPT1; w) BAX; BAK; ICAM-1; and SIRT-1; x) BAX; BAK; and ICAM-1; y) BAX; BAK; BCKDHA; ICAM-1; GGTA1; CMAH; LPL; LPLA2; and PPT1; z) BAX; BAK; BCKDHA; ICAM-1; SIRT-1; GGTA1; CMAH; LPL; LPLA2; and PPT1; aa) BAX; BAK; BCKDHA; ICAM-1; SIRT-1; MYC; GGTA1; CMAH; LPL; LPLA2; and PPT1; bb) BAX; BAK; BCKDHA; ICAM-1; SIRT-1; MYC; GGTA1; CMAH; LPL, LPLA2; PPT1; and LIPA; cc) BAX; BAK; BCKDHA; ICAM-1; GGTA1; CMAH; LPLA2; PPT1; and LIPA; dd) BAX; BAK; BCKDHA; ICAM-1; SIRT-1; GGTA1; CMAH; LPLA2; PPT1; and LIPA; ee) BAX; BAK; BCKDHA; ICAM-1; SIRT-1; MYC; GGTA1; CMAH; LPLA2; PPT1; and LIPA; ff) BAX; BAK; BCKDHA; ICAM-1; LPL; LPLA2; and PPT1; gg) BAX; BAK; BCKDHA; ICAM-1; SIRT-1; LPL, LPLA2; and PPT1; hh) BAX; BAK; BCKDHA; ICAM-1; SIRT-1; MYC; LPL; LPLA2; and PPT1; ii) BAX; BAK; BCKDHA; ICAM-1; SIRT-1; MYC; LPL; LPLA2; PPT1; and LIPA; jj) BAX; BAK; BCKDHA; ICAM-1; SIRT-1; and MYC; kk) BAX; BAK; BCKDHA; ICAM-1; PERK; SIRT-1; and MYC; 11) BAX; BAK; BCKDHA; ICAM-1; PERK; SIRT-1; MYC; GGTA1; CMAH; LPL, LPLA2; PPT1; and LIPA; mm) BAX; BAK; BCKDHA; LPL; LPLA2; GGTA1; and CMAH; nn) BAX; BAK; BCKDHA; PERK; LPL; LPLA2; GGTA1; and CMAH; oo) BAX; BAK; BCKDHA; MYC; LPL; LPLA2; GGTA1; and CMAH; pp) BAX; BAK; BCKDHA; MYC; PERK; LPL; LPLA2; GGTA1; and CMAH; qq) BAX; BAK; BCKDHA; LPL; LPLA2; GGTA1; CMAH; and PPT1; rr) BAX; BAK; BCKDHA; PERK; LPL; LPLA2; GGTA1; CMAH; and PPT1; ss) BAX; BAK; BCKDHA; MYC; LPL; LPLA2; GGTA1; CMAH; and PPT1; tt) BAX; BAK; BCKDHA; MYC; PERK; LPL; LPLA2; GGTA1; CMAH; and PPT1; uu) BAX; BAK; BCKDHA; ICAM-1; and SIRT-1; vv) BAX; BAK; BCKDHA; and ICAM-1; ww) BAX; BAK; BCKDHB; ICAM-1; GGTA1; CMAH; LPL; LPLA2; and PPT1; xx) BAX; BAK; BCKDHB; ICAM-1; SIRT-1; GGTA1; CMAH; LPL; LPLA2; and PPT1; yy) BAX; BAK; BCKDHB; ICAM-1; SIRT-1; MYC; GGTA1; CMAH; LPL; LPLA2; and PPT1; zz) BAX; BAK; BCKDHB; ICAM-1; SIRT-1; MYC; GGTA1; CMAH; LPL, LPLA2; PPT1; and LIPA; aaa) BAX; BAK; BCKDHB; ICAM-1; GGTA1; CMAH; LPLA2; PPT1; and LIPA; bbb) BAX; BAK; BCKDHB; ICAM-1; SIRT-1; GGTA1; CMAH; LPLA2; PPT1; and LIPA; ccc) BAX; BAK; BCKDHB; ICAM-1; SIRT-1; MYC; GGTA1; CMAH; LPLA2; PPT1; and LIPA; ddd) BAX; BAK; BCKDHB; ICAM-1; LPL; LPLA2; and PPT1; eee) BAX; BAK; BCKDHB; ICAM-1; SIRT-1; LPL, LPLA2; and PPT1; fff) BAX; BAK; BCKDHB; ICAM-1; SIRT-1; MYC; LPL; LPLA2; and PPT1; ggg) BAX; BAK; BCKDHB; ICAM-1; SIRT-1; MYC; LPL; LPLA2; PPT1; and LIPA; hhh) BAX; BAK; BCKDHB; ICAM-1; SIRT-1; and MYC; iii) BAX; BAK; BCKDHB; ICAM-1; PERK; SIRT-1; and MYC; jjj) BAX; BAK; BCKDHB; ICAM-1; PERK; SIRT-1; MYC; GGTA1; CMAH; LPL, LPLA2; PPT1; and LIPA; kkk) BAX; BAK; BCKDHB; LPL; LPLA2; GGTA1; and CMAH; 111) BAX; BAK; BCKDHB; PERK; LPL; LPLA2; GGTA1; and CMAH; mmm) BAX; BAK; BCKDHB; MYC; LPL; LPLA2; GGTA1; and CMAH; nnn) BAX; BAK; BCKDHB; MYC; PERK; LPL; LPLA2; GGTA1; and CMAH; ooo) BAX; BAK; BCKDHB; LPL; LPLA2; GGTA1; CMAH; and PPT1; ppp) BAX; BAK; BCKDHB; PERK; LPL; LPLA2; GGTA1; CMAH; and PPT1; qqq) BAX; BAK; BCKDHB; MYC; LPL; LPLA2; GGTA1; CMAH; and PPT1; rrr) BAX; BAK; BCKDHB; MYC; PERK; LPL; LPLA2; GGTA1; CMAH; and PPT1; sss) BAX; BAK; BCKDHB; ICAM-1; and SIRT-1; ttt) BAX; BAK; BCKDHB; and ICAM-1; uuu) BAX; BAK; BCKDHA; BCKDHB; ICAM-1; GGTA1; CMAH; LPL; LPLA2; and PPT1; vvv) BAX; BAK; BCKDHA; BCKDHB; ICAM-1; SIRT-1; GGTA1; CMAH; LPL; LPLA2; and PPT1; www) BAX; BAK; BCKDHA; BCKDHB; ICAM-1; SIRT-1; MYC; GGTA1; CMAH; LPL; LPLA2; and PPT1; xxx) BAX; BAK; BCKDHA; BCKDHB; ICAM-1; SIRT-1; MYC; GGTA1; CMAH; LPL, LPLA2; PPT1; and LIPA; yyy) BAX; BAK; BCKDHA; BCKDHB; ICAM-1; GGTA1; CMAH; LPLA2; PPT1; and LIPA; zzz) BAX; BAK; BCKDHA; BCKDHB; ICAM-1; SIRT-1; GGTA1; CMAH; LPLA2; PPT1; and LIPA; aaaa) BAX; BAK; BCKDHA; BCKDHB; ICAM-1; SIRT-1; MYC; GGTA1; CMAH; LPLA2; PPT1; and LIPA; bbbb) BAX; BAK; BCKDHA; BCKDHB; ICAM-1; LPL; LPLA2; and PPT1; cccc) BAX; BAK; BCKDHA; BCKDHB; ICAM-1; SIRT-1; LPL, LPLA2; and PPT1; dddd) BAX; BAK; BCKDHA; BCKDHB; ICAM-1; SIRT-1; MYC; LPL; LPLA2; and PPT1; eeee) BAX; BAK; BCKDHA; BCKDHB; ICAM-1; SIRT-1; MYC; LPL; LPLA2; PPT1; and LIPA; ffff) BAX; BAK; BCKDHA; BCKDHB; ICAM-1; SIRT-1; and MYC; gggg) BAX; BAK; BCKDHA; BCKDHB; ICAM-1; PERK; SIRT-1; and MYC; hhhh) BAX; BAK; BCKDHA; BCKDHB; ICAM-1; PERK; SIRT-1; MYC; GGTA1; CMAH; LPL, LPLA2; PPT1; and LIPA; iiii) BAX; BAK; BCKDHA; BCKDHB; LPL; LPLA2; GGTA1; and CMAH; jjjj) BAX; BAK; BCKDHA; BCKDHB; PERK; LPL; LPLA2; GGTA1; and CMAH; kkkk) BAX; BAK; BCKDHA; BCKDHB; MYC; LPL; LPLA2; GGTA1; and CMAH; llll) BAX; BAK; BCKDHA; BCKDHB; MYC; PERK; LPL; LPLA2; GGTA1; and CMAH; mmmm) BAX; BAK; BCKDHA; BCKDHB; LPL; LPLA2; GGTA1; CMAH; and PPT1; nnnn) BAX; BAK; BCKDHA; BCKDHB; PERK; LPL; LPLA2; GGTA1; CMAH; and PPT1; oooo) BAX; BAK; BCKDHA; BCKDHB; MYC; LPL; LPLA2; GGTA1; CMAH; and PPT1; pppp) BAX; BAK; BCKDHA; BCKDHB; MYC; PERK; LPL; LPLA2; GGTA1; CMAH; and PPT1; qqqq) BAX; BAK; BCKDHA; BCKDHB; ICAM-1; and SIRT-1; or rrrr) BAX; BAK; BCKDHA; BCKDHB; and ICAM-1.

### BRIEF DESCRIPTION OF THE DRAWINGS

[0041] FIGS. 1A-1D depict the distribution of expression of three ERV species in RVLP Gag knockout clones and controls (FIG. 1A); the total RVLP titers (sum of three ERVs) in Gag knockout clones and controls (FIG. 1B); the production culture integral viable cell concentration (IVCC) in Gag knockout clones and controls (FIG. 1C); and RVLP titers assessed by TEM in Gag knockout clones and controls (FIG. 1D).

[0042] FIG. 2A-2C depict knockout strategies using dual CRISPR/Cas9 targeting nucleases for CHERV-3g and CHERV-1b to produce large deletions (FIG. 2A); and RVLP titers assessed by RT-ddPCR (2B) and TEM (2C) in deletion knockout clones and controls.

### DETAILED DESCRIPTION

[0043] The presently disclosed subject matter relates, in certain embodiments, to RVLP-reduced CHO cells suitable to produce recombinant proteins, as well as methods of producing and using such RVLP-reduced CHO production cells. For example, but not by way of limitation, the presently disclosed subject matter is directed, in part, to modified CHO cells and method for producing such modified CHO cells where, prior to the modification, the CHO cells comprise two or more ERV loci selected from:
[0044] (a) CHERV-1b (Genbank Accession No. MN527960, SEQ ID NO. 8);
[0045] (b) CHERV-2g (Genbank Accession No. MN527961, SEQ ID NO. 9);
[0046] (c) ETC109F (30021-39247 of SEQ ID NO. 10);
[0047] (d) CHERV-3g (Genbank Accession No. MN527962, SEQ ID NO. 11); and
[0048] (e) an ERV locus comprising a sequence having at least 90% identity to any one of (a)-(d), where the modification comprises inactivation, i.e., a reduction or elimination of expression as compared to an unmodified CHO cell, of two or more of the ERV loci of (a)-(e) present in the CHO cell prior to such modification.

[0049] For purposes of clarity of disclosure and not by way of limitation, the detailed description is divided into the following subsections:

[0050] 1. Definitions

[0051] 2. Inactivation of Endogenous Retrovirus Loci

[0052] 3. Host Cells

[0053] 4. Integration of Exogenous Nucleic Acids

[0054] 5. Preparation and Use of RVLP-Reduced Host Cells

[0055] 6. Products

[0056] 7. Examples

### 1. Definitions

[0057] Unless otherwise defined, all technical and scientific terms used herein have the same meaning as commonly understood by one of ordinary skill in the art. In case of conflict, the present document, including definitions, will control. Preferred methods and materials are described below, although methods and materials similar or equivalent to those described herein can be used in practice or testing of the presently disclosed subject matter. All publications, patent applications, patents and other references mentioned herein are incorporated by reference in their entirety. The materials, methods, and examples disclosed herein are illustrative only and not intended to be limiting.

[0058] The terms “comprise(s),” “include(s),” “having,” “has,” “can,” “contain(s),” and variants thereof, as used herein, are intended to be open-ended transitional phrases, terms, or words that do not preclude the possibility of additional acts or structures. The singular forms “a,” “an” and “the” include plural references unless the context clearly dictates otherwise. The present disclosure also contemplates other embodiments “comprising,” “consisting of”, and “consisting essentially of,” the embodiments or elements presented herein, whether explicitly set forth or not.

[0059] For the recitation of numeric ranges herein, each intervening number there between with the same degree of precision is explicitly contemplated. For example, for the range of 6-9, the numbers 7 and 8 are contemplated in addition to 6 and 9, and for the range 6.0-7.0, the number 6.0, 6.1, 6.2, 6.3, 6.4, 6.5, 6.6, 6.7, 6.8, 6.9, and 7.0 are explicitly contemplated.

[0060] As used herein, the term “about” or “approximately” means within an acceptable error range for the particular value as determined by one of ordinary skill in the art, which will depend in part on how the value is measured or determined, i.e., the limitations of the measurement system. For example, “about” can mean within 3 or more than 3 standard deviations, per the practice in the art. Alternatively, “about” can mean a range of up to 20%, preferably up to 10%, more preferably up to 5%, and more preferably still up to 1% of a given value. Alternatively, particularly with respect to biological systems or processes, the term can mean within an order of magnitude, preferably within 5-fold, and more preferably within 2-fold, of a value.

[0061] As used herein, the term “selection marker” can be a gene that allows cells carrying the gene to be specifically selected for or against, in the presence of a corresponding selection agent. For example, but not by way of limitation, a selection marker can allow the host cell transformed with the selection marker gene to be positively selected for in the presence of the gene; a non-transformed host cell would not be capable of growing or surviving under the selective conditions. Selection markers can be positive, negative or bi-functional. Positive selection markers can allow selection for cells carrying the marker, whereas negative selection markers can allow cells carrying the marker to be selectively eliminated. A selection marker can confer resistance to a drug or compensate for a metabolic or catabolic defect in the host cell. In prokaryotic cells, amongst others, genes conferring resistance against ampicillin, tetracycline, kanamycin or chloramphenicol can be used. Resistance genes useful as selection markers in eukaryotic cells include, but are not limited to, genes for aminoglycoside phosphotransferase (APH) (e.g., hygromycin phosphotransferase (HYG), neomycin and G418 APH), dihydrofolate reductase (DHFR), thymidine kinase (TK), glutamine synthetase (GS), asparagine synthetase, tryptophan synthetase (indole), histidinol dehydrogenase (histidinol D), and genes encoding resistance to puromycin, blasticidin, bleomycin, phleomycin, chloramphenicol, Zeocin, and mycophenolic acid. Further marker genes are described in WO 92/08796 and WO 94/28143.

[0062] Beyond facilitating a selection in the presence of a corresponding selection agent, a selection marker can alternatively provide a gene encoding a molecule normally not present in the cell, e.g., green fluorescent protein (GFP), enhanced GFP (eGFP), synthetic GFP, yellow fluorescent protein (YFP), enhanced YFP (eYFP), cyan fluorescent protein (CFP), mPlum, mCherry, tdTomato, mStrawberry, J-red, DsRed-monomer, mOrange, mKO, mCitrine, Venus, YPet, Emerald, CyPet, mCFPm, Cerulean, and T-Sapphire. Cells harboring such a gene can be distinguished from cells not harboring this gene, e.g., by the detection of the fluorescence emitted by the encoded polypeptide.

[0063] As used herein, the term “operably linked” refers to a juxtaposition of two or more components, wherein the components are in a relationship permitting them to function in their intended manner. For example, a promoter and/or an enhancer is operably linked to a coding sequence if the promoter and/or enhancer acts to modulate the transcription of the coding sequence. In certain embodiments, DNA sequences that are “operably linked” are contiguous and adjacent on a single chromosome. In certain embodiments, e.g., when it is necessary to join two protein encoding regions, such as a secretory leader and a polypeptide, the sequences are contiguous, adjacent, and in the same reading frame. In certain embodiments, an operably linked promoter is located upstream of the coding sequence and can be adjacent to it. In certain embodiments, e.g., with respect to enhancer sequences modulating the expression of a coding sequence, the two components can be operably linked although not adjacent. An enhancer is operably linked to a coding sequence if the enhancer increases transcription of the coding sequence. Operably linked enhancers can be located upstream, within, or downstream of coding sequences and can be located a considerable distance from the promoter of the coding sequence. Operable linkage can be accomplished by recombinant methods known in the art, e.g., using PCR methodology and/or by ligation at convenient restriction sites. If convenient restriction sites do not exist, then synthetic oligonucleotide adaptors or linkers can be used in accord with conventional practice. An internal ribosomal entry site (IRES) is operably linked to an open reading frame (ORF) if it allows initiation of translation of the ORF at an internal location in a 5′ end-independent manner.

[0064] As used herein, the term “expression” refers to transcription and/or translation. In certain embodiments, the level of transcription of a desired product can be determined based on the amount of corresponding mRNA that is present. For example, mRNA transcribed from a sequence of interest can be quantitated by PCR or by Northern hybridization. In certain embodiments, protein encoded by a sequence of interest can be quantitated by various methods, e.g. by ELISA, by assaying for the biological activity of the protein, or by employing assays that are independent of such activity, such as Western blotting or radioimmunoassay, using antibodies that recognize and bind to the protein.

[0065] The term “antibody” herein is used in the broadest sense and encompasses various antibody structures, including but not limited to monoclonal antibodies, polyclonal antibodies, multispecific antibodies (e.g., bispecific antibodies), half antibodies, and antibody fragments so long as they exhibit a desired antigen-binding activity.

[0066] As used herein, the term “antibody fragment” refers to a molecule other than an intact antibody that comprises a portion of an intact antibody that binds the antigen to which the intact antibody binds. Examples of antibody fragments include but are not limited to Fv, Fab, Fab′, Fab′-SH, F(ab′)2; diabodies; linear antibodies; single-chain antibody molecules (e.g., scFv); and multispecific antibodies formed from antibody fragments. For a review of certain antibody fragments, see Holliger and Hudson, Nature Biotechnology 23:1126-1136 (2005).

[0067] As used herein, the term “variable region” or “variable domain” refers to the domain of an antibody heavy or light chain that is involved in binding the antibody to antigen. The variable domains of the heavy chain and light chain (VH and VL, respectively) of a native antibody generally have similar structures, with each domain comprising four conserved framework regions (FRs) and three hypervariable regions (HVRs). (See, e.g., Kindt et al. Kuby Immunology, 6th ed., W.H. Freeman and Co., page 91 (2007).) A single VH or VL domain may be sufficient to confer antigen-binding specificity. Furthermore, antibodies that bind to a particular antigen may be isolated using a VH or VL domain from an antibody that binds the antigen to screen a library of complementary VL or VH domains, respectively. See, e.g., Portolano et al., J. Immunol. 150:880-887 (1993); Clarkson et al., Nature 352:624-628 (1991).

[0068] As used herein, the term “heavy chain” refers to an immunoglobulin heavy chain.

[0069] As used herein, the term “light chain” refers to an immunoglobulin light chain.

[0070] The “class” of an antibody refers to the type of constant domain or constant region possessed by its heavy chain. There are five major classes of antibodies: IgA, IgD, IgE, IgG, and IgM, and several of these may be further divided into subclasses (isotypes), e.g., IgG1, IgG2, IgG3, IgG4, IgA1, and IgA2. The heavy chain constant domains that correspond to the different classes of immunoglobulins are called α, δ, ε, γ, and μ, respectively.

[0071] The term “monoclonal antibody” as used herein refers to an antibody obtained from a population of substantially homogeneous antibodies, i.e., the individual antibodies comprising the population are identical and/or bind the same epitope, except for possible variant antibodies, e.g., containing naturally occurring mutations or arising during production of a monoclonal antibody preparation, such variants generally being present in minor amounts. In contrast to polyclonal antibody preparations, which typically include different antibodies directed against different determinants (epitopes), each monoclonal antibody of a monoclonal antibody preparation is directed against a single determinant on an antigen. Thus, the modifier “monoclonal” indicates the character of the antibody as being obtained from a substantially homogeneous population of antibodies, and is not to be construed as requiring production of the antibody by any particular method. For example, the monoclonal antibodies in accordance with the present invention may be made by a variety of techniques, including but not limited to the hybridoma method, recombinant DNA methods, phage-display methods, and methods utilizing transgenic animals containing all or part of the human immunoglobulin loci, such methods and other exemplary methods for making monoclonal antibodies being described herein.

[0072] “Multispecific antibodies” are monoclonal antibodies that have binding specificities for at least two different sites, i.e., different epitopes on different antigens or different epitopes on the same antigen. In certain aspects, the multispecific antibody has three or more binding specificities. Multispecific antibodies may be prepared as full-length antibodies or antibody fragments.

[0073] The terms “full length antibody”, “intact antibody”, and “whole antibody” are used herein interchangeably to refer to an antibody having a structure substantially similar to a native antibody structure or having heavy chains that contain an Fc region as defined herein.

[0074] An “antibody fragment” refers to a molecule other than an intact antibody that comprises a portion of an intact antibody that binds the antigen to which the intact antibody binds. Examples of antibody fragments include but are not limited to Fv, Fab, Fab′, Fab′-SH, F(ab′)2; diabodies; linear antibodies; single-chain antibody molecules (e.g., scFv, and scFab); single domain antibodies (dAbs); and multispecific antibodies formed from antibody fragments. For a review of certain antibody fragments, see Holliger and Hudson, Nature Biotechnology 23:1126-1136 (2005).

[0075] The term “chimeric” antibody refers to an antibody in which a portion of the heavy and/or light chain is derived from a particular source or species, while the remainder of the heavy and/or light chain is derived from a different source or species.

[0076] A “human antibody” is one which possesses an amino acid sequence which corresponds to that of an antibody produced by a human or a human cell or derived from a non-human source that utilizes human antibody repertoires or other human antibody-encoding sequences. This definition of a human antibody specifically excludes a humanized antibody comprising non-human antigen-binding residues.

[0077] A “humanized” antibody refers to a chimeric antibody comprising amino acid residues from non-human CDRs and amino acid residues from human FRs. In certain aspects, a humanized antibody will comprise substantially all of at least one, and typically two, variable domains, in which all or substantially all of the CDRs correspond to those of a non-human antibody, and all or substantially all of the FRs correspond to those of a human antibody. A humanized antibody optionally may comprise at least a portion of an antibody constant region derived from a human antibody. A “humanized form” of an antibody, e.g., a non-human antibody, refers to an antibody that has undergone humanization. The term “monoclonal antibody” as used herein refers to an antibody obtained from a population of substantially homogeneous antibodies, i.e., the individual antibodies comprising the population are identical and/or bind the same epitope, except for possible variant antibodies, e.g., containing naturally occurring mutations or arising during production of a monoclonal antibody preparation, such variants generally being present in minor amounts. In contrast to polyclonal antibody preparations, which typically include different antibodies directed against different determinants (epitopes), each monoclonal antibody of a monoclonal antibody preparation is directed against a single determinant on an antigen. Thus, the modifier “monoclonal” indicates the character of the antibody as being obtained from a substantially homogeneous population of antibodies, and is not to be construed as requiring production of the antibody by any particular method.

[0078] The term “therapeutic antibody” refers to an antibody that is used in the treatment of disease. A therapeutic antibody may have various mechanisms of action. A therapeutic antibody may bind and neutralize the normal function of a target associated with an antigen. For example, a monoclonal antibody that blocks the activity of the of protein needed for the survival of a cancer cell causes the cell's death. Another therapeutic monoclonal antibody may bind and activate the normal function of a target associated with an antigen. For example, a monoclonal antibody can bind to a protein on a cell and trigger an apoptosis signal. Yet another monoclonal antibody may bind to a target antigen expressed only on diseased tissue; conjugation of a toxic payload (effective agent), such as a chemotherapeutic or radioactive agent, to the monoclonal antibody can create an agent for specific delivery of the toxic payload to the diseased tissue, reducing harm to healthy tissue. A “biologically functional fragment” of a therapeutic antibody will exhibit at least one if not some or all of the biological functions attributed to the intact antibody, the function comprising at least specific binding to the target antigen.

[0079] The term “diagnostic antibody” refers to an antibody that is used as a diagnostic reagent for a disease. The diagnostic antibody may bind to a target antigen that is specifically associated with, or shows increased expression in, a particular disease. The diagnostic antibody may be used, for example, to detect a target in a biological sample from a patient, or in diagnostic imaging of disease sites, such as tumors, in a patient. A “biologically functional fragment” of a diagnostic antibody will exhibit at least one if not some or all of the biological functions attributed to the intact antibody, the function comprising at least specific binding to the target antigen.

[0080] The terms “host cell”, “host cell line”, and “host cell culture” are used interchangeably and refer to cells into which exogenous nucleic acid has been introduced, including the progeny of such cells. Host cells include “transformants” and “transformed cells”, which include the primary transformed cell and progeny derived therefrom without regard to the number of passages. Progeny may not be completely identical in nucleic acid content to a parent cell, but may contain mutations. Mutant progeny that have the same function or biological activity as screened or selected for in the originally transformed cell are included herein.

[0081] The term “nucleic acid molecule” or “polynucleotide” includes any compound and/or substance that comprises a polymer of nucleotides. Each nucleotide is composed of a base, specifically a purine- or pyrimidine base (i.e. cytosine (C), guanine (G), adenine (A), thymine (T) or uracil (U)), a sugar (i.e. deoxyribose or ribose), and a phosphate group. Often, the nucleic acid molecule is described by the sequence of bases, whereby said bases represent the primary structure (linear structure) of a nucleic acid molecule. The sequence of bases is typically represented from 5′ to 3′. Herein, the term nucleic acid molecule encompasses deoxyribonucleic acid (DNA) including e.g., complementary DNA (cDNA) and genomic DNA, ribonucleic acid (RNA), in particular messenger RNA (mRNA), synthetic forms of DNA or RNA, and mixed polymers comprising two or more of these molecules. The nucleic acid molecule may be linear or circular. In addition, the term nucleic acid molecule includes both, sense and antisense strands, as well as single stranded and double stranded forms. Moreover, the herein described nucleic acid molecule can contain naturally occurring or non-naturally occurring nucleotides. Examples of non-naturally occurring nucleotides include modified nucleotide bases with derivatized sugars or phosphate backbone linkages or chemically modified residues. Nucleic acid molecules also encompass DNA and RNA molecules which are suitable as a vector for direct expression of an antibody of the invention in vitro and/or in vivo, e.g., in a host or patient. Such DNA (e.g., cDNA) or RNA (e.g., mRNA) vectors, can be unmodified or modified. For example, mRNA can be chemically modified to enhance the stability of the RNA vector and/or expression of the encoded molecule so that mRNA can be injected into a subject to generate the antibody in vivo (see e.g., Stadler et al, Nature Medicine 2017, published online 12 Jun. 2017, doi:10.1038/nm.4356 or EP 2 101 823 B1).

[0082] An “isolated” nucleic acid refers to a nucleic acid molecule that has been separated from a component of its natural environment. An isolated nucleic acid includes a nucleic acid molecule contained in cells that ordinarily contain the nucleic acid molecule, but the nucleic acid molecule is present extrachromosomally or at a chromosomal location that is different from its natural chromosomal location.

[0083] As used herein, the term “vector” refers to a nucleic acid molecule capable of propagating another nucleic acid to which it is linked. The term includes the vector as a self-replicating nucleic acid structure as well as the vector incorporated into the genome of a host cell into which it has been introduced. In certain embodiments, vectors direct the expression of nucleic acids to which they are operatively linked. Such vectors are referred to herein as “expression vectors.”

[0084] As used herein, the term “homologous sequences” refers to sequences that share a significant sequence similarity as determined by an alignment of the sequences. For example, two sequences can be about 50%, 60%, 70%, 80%, 90%, 95%, 99%, or 99.9% homologous. The alignment is carried out by algorithms and computer programs including, but not limited to, BLAST, FASTA, and HMME, which compares sequences and calculates the statistical significance of matches based on factors such as sequence length, sequence identify and similarity, and the presence and length of sequence mismatches and gaps. Homologous sequences can refer to both DNA and protein sequences.

[0085] As used herein, the term “flanking” refers to that a first nucleotide sequence is located at either a 5′ or 3′ end, or both ends of a second nucleotide sequence. The flanking nucleotide sequence can be adjacent to or at a defined distance from the second nucleotide sequence. There is no specific limit of the length of a flanking nucleotide sequence. For example, a flanking sequence can be a few base pairs or a few thousand base pairs. In certain embodiments, the length of a flanking nucleotide sequence can be about at least 15 base pairs, at least 20 base pairs, at least 30 base pairs, at least 40 base pairs, at least 50 base pairs, at least 75 base pairs, at least 100 base pairs, at least 150 base pairs, at least 200 base pairs, at least 300 base pairs, at least 400 base pairs, at least 500 base pairs, at least 1,000 base pairs, at least 1,500 base pairs, at least 2,000 base pairs, at least 3,000 base pairs, at least 4,000 base pairs, at least 5,000 base pairs, at least 6,000 base pairs, at least 7,000 base pairs, at least 8,000 base pairs, at least 9,000 base pairs, at least 10,000 base pairs.

[0086] As used herein, the term “exogenous” indicates that a nucleotide sequence does not originate from a host cell and is introduced into a host cell by traditional DNA delivery methods, e.g., by transfection, electroporation, or transformation methods. The term “endogenous” refers to that a nucleotide sequence originates from a host cell. An “exogenous” nucleotide sequence can have an “endogenous” counterpart that is identical in base compositions, but where the “exogenous” sequence is introduced into the host cell, e.g., via recombinant DNA technology.

### 2. Inactivation of Endogenous Retrovirus Loci

[0087] The presently disclosed subject matter relates, in certain embodiments, to RVLP-reduced CHO cells suitable to produce recombinant proteins. Such RVLP-reduced CHO cells can, in certain embodiments, be produced via the inactivation of ERV loci. In certain embodiments, a plurality of ERV loci is inactivated. For example, but not by way of limitation, the presently disclosed subject matter is directed, in part, to modified CHO cells and method for producing such modified CHO cells where, prior to the modification, the CHO cells comprise two or more ERV loci selected from:
[0088] (a) CHERV-1b (Genbank Accession No. MN527960, SEQ ID NO. 8);
[0089] (b) CHERV-2g (Genbank Accession No. MN527961, SEQ ID NO. 9);
[0090] (c) ETC109F (30021-39247 of SEQ ID NO. 10);
[0091] (d) CHERV-3g (Genbank Accession No. MN527962, SEQ ID NO. 11); and
[0092] (e) an ERV locus comprising a sequence having at least 90% identity to any one of (a)-(d), where the modification comprises inactivation, i.e., a reduction or elimination of expression as compared to an unmodified CHO cell, of two or more of the ERV loci of (a)-(e) present in the CHO cell prior to such modification.

[0093] With respect to ETC109F, which corresponds to 30021-39247 of SEQ ID NO. 10 (%′ LTR to 3′ LTR), the remaining portions of SEQ ID NO. 10 correspond to: the CHO-K1 genomic sequence upstream of 5′ end of ETC109F (1-30020 of SEQ ID NO. 10); and: CHO-K1 genomic sequence downstream of 3′ end of ETC109F (39248-59558 of SEQ ID NO. 10). Additional CHERV sequences presented in the context of their genomic loci include CHERV-3g allele A, which is presented as SEQ ID NO. 12, CHERV-3g allele B, which is presented as SEQ ID NO. 13, and CHERV-1b, which is presented as SEQ ID NO. 14.

[0094] In certain embodiments, the present disclosure relates methods for inactivation, i.e., a reduction or elimination of expression as compared to an unmodified CHO cell, of two or more ERV loci include, where such inactivation comprises: (1) modification of a gene coding for an ERV protein, e.g., by introducing a deletion, insertion, substitution, or combination thereof into the gene; (2) reducing or eliminating the transcription and/or stability of the mRNA encoding the ERV protein; and (3) reducing or eliminating the translation of the mRNA encoding the ERV protein. In certain embodiments, the reduction or elimination of the ERV protein expression is obtained by targeted genome editing. For example, RNA-guided nuclease-based genome editing systems, e.g., CRISPR/Cas9-based genome editing systems, can be employed to modify one or more target genes, resulting in the reduction or elimination of expression of the ERV gene (or genes) targeted for editing. Additional editing systems, e.g., TALENS, meganucleases, and zinc finger nucleases, can also find use in the methods of editing ERV genes.

[0095] In certain embodiments, the inactivation, i.e., a reduction or elimination of expression as compared to an unmodified CHO cell, of two or more ERV loci comprises a knock-out of the respective ERV GAG coding sequence. For example, but not by way of limitation, the knock-out of the respective ERV GAG coding sequence can comprise introduction of an indel into the ERV GAG coding sequence via CRISPR/Cas9-based genome editing. In certain non-limiting embodiments, the knock-out of the respective ERV GAG coding sequence can comprise introduction of a base edit into the ERV GAG coding sequence via CRISPR/Cas9-based base editing. In certain non-limiting embodiments, the knock-out of the respective ERV GAG coding sequence can comprise introduction of deletions flanking the ERV GAG coding sequence via CRISPR/Cas9-based genome editing.

[0096] In certain embodiments of the present disclosure, the inactivation, i.e., a reduction or elimination of expression as compared to an unmodified CHO cell, of two or more ERV loci comprises a reduction in the protein expression of an ERV protein product to less than about 90%, less than about 80%, less than about 70%, less than about 60%, less than about 50%, less than about 40%, less than about 30%, less than about 20%, less than about 10%, less than about 5%, less than about 4%, less than about 3%, less than about 2% or less than about 1% of the corresponding ERV protein expression of a reference cell, e.g., a CHO host cell expressing an ERV that has not been inactivated. In certain embodiments, the expression of one or more ERV proteins in a cell that has been modified to reduce or eliminate expression of the ERV protein(s), is less than about 90%, less than about 80%, less than about 70%, less than about 60%, less than about 50%, less than about 40%, less than about 30%, less than about 20%, less than about 10%, less than about 5%, less than about 4%, less than about 3%, less than about 2%, or less than about 1% of the corresponding endogenous protein expression of a reference cell, e.g., a CHO host cell expressing an ERV that has not been inactivated.

### 3. Host Cells

[0097] The presently disclosed subject matter is directed, in certain embodiments, to CHO host cells. In certain embodiments, the CHO host cell is a CHO K1 host cell. In certain embodiments, the CHO host cell is a CHO K1SV host cell. In certain embodiments, the CHO host cell is a DG44 host cell. In certain embodiments, the CHO host cell is a DUKXB-11 host cell. In certain embodiments, the CHO host cell is a CHOK1S host cell. In certain embodiments, the CHO host cell is a CHO KIM host cell.

### 3.1 Host Cells Suitable for Integration of Exogenous Nucleotide Sequences

[0098] The presently disclosed subject matter provides, in certain embodiments, modified CHO host cells suitable for targeted integration of exogenous nucleotide sequences. In certain embodiments, the modified CHO host cell comprises an exogenous nucleotide sequence integrated at an integration site on the genome of the host cell, i.e., the host cell is a TI host cell.

[0099] An “integration site” comprises a nucleic acid sequence within a host cell genome into which an exogenous nucleotide sequence is inserted. In certain embodiments, an integration site is between two adjacent nucleotides on the host cell genome. In certain embodiments, an integration site includes a stretch of nucleotides between any of which an exogenous nucleotide sequence can be inserted. In certain embodiments, the integration site is located within a specific locus of the genome of the TI host cell. In certain embodiments, the integration site is within an endogenous gene of the TI host cell.

[0100] In certain embodiments, the exogenous nucleotide sequence is integrated at a site within a specific locus of the genome of a TI host cell. In certain embodiments, the locus into which the exogenous nucleotide sequence is integrated is at least about 50%, at least about 60%, at least about 70%, at least about 80%, at least about 90%, at least about 95%, at least about 99%, or at least about 99.9% homologous to a sequence selected from SEQ ID Nos. 1-7.

[0101] In certain embodiments, the locus into which the exogenous nucleotide sequence is integrated is at least about 50%, at least about 60%, at least about 70%, at least about 80%, at least about 90%, at least about 95%, at least about 99%, or at least about 99.9% homologous to all or a portion of a sequence selected from Contigs NW_006874047.1, NW_006884592.1, NW_006881296.1, NW_003616412.1, NW_003615063.1, NW_006882936.1, and NW 003615411.1.

[0102] In certain embodiments, the exogenous nucleotide sequence is integrated at an integration site located within a position selected from nucleotides numbered 1-1,000 bp; 1,000-2,000 bp; 2,000-3,000 bp; 3,000-4,000 bp; and 4,000-4,301 bp of SEQ ID No. 1. In certain embodiments, the exogenous nucleotide sequence is integrated at an integration site located within a position selected from nucleotides numbered 1-100,000 bp; 100,000-200,000 bp; 200,000-300,000 bp; 300,000-400,000 bp; 400,000-500,000 bp; 500,000-600,000 bp; 600,000-700,000 bp; and 700,000-728785 bp of SEQ ID No. 2. In certain embodiments, the exogenous nucleotide sequence is integrated at an integration site located within a position selected from nucleotides numbered 1-100,000 bp; 100,000-200,000 bp; 200,000-300,000 bp; 300,000-400,000 bp; and 400,000-413,983 of SEQ ID No. 3. In certain embodiments, the exogenous nucleotide sequence is integrated at an integration site located within a position selected from nucleotides numbered 1-10,000 bp; 10,000-20,000 bp; 20,000-30,000 bp; and 30,000-30,757 bp of SEQ ID No. 4. In certain embodiments, the exogenous nucleotide sequence is integrated at an integration site located within a position selected from nucleotides numbered 1-10,000 bp; 10,000-20,000 bp; 20,000-30,000 bp; 30,000-40,000 bp; 40,000-50,000 bp; 50,000-60,000 bp; and 60,000-68,962 bp of SEQ ID No. 5. In certain embodiments, the exogenous nucleotide sequence is integrated at an integration site located within a position selected from nucleotides numbered 1-10,000 bp; 10,000-20,000 bp; 20,000-30,000 bp; 30,000-40,000 bp; 40,000-50,000 bp; and 50,000-51,326 bp of SEQ ID No. 6. In certain embodiments, the exogenous nucleotide sequence is integrated at an integration site located within a position selected from nucleotides numbered 1-10,000 bp; 10,000-20,000 bp; and 20,000-22,904 bp of SEQ ID No. 7.

[0103] In certain embodiments, the nucleotide immediately 5′ of the integrated exogenous sequence is a nucleotide within the sequence of nucleotides 41190-45269 of NW_006874047.1, nucleotides 63590-207911 of NW_006884592.1, nucleotides 253831-491909 of NW_006881296.1, nucleotides 69303-79768 of NW_003616412.1, nucleotides 293481-315265 of NW_003615063.1, nucleotides 2650443-2662054 of NW_006882936.1, or nucleotides 82214-97705 of NW_003615411.1. In certain embodiments, the nucleotide immediately 5′ of the integrated exogenous sequence is a nucleotide within a sequence of nucleotides sequences at least 50% homologous to nucleotides 41190-45269 of NW_006874047.1, nucleotides 63590-207911 of NW_006884592.1, nucleotides 253831-491909 of NW_006881296.1, nucleotides 69303-79768 of NW_003616412.1, nucleotides 293481-315265 of NW_003615063.1, nucleotides 2650443-2662054 of NW_006882936.1, or nucleotides 82214-97705 of NW_003615411.1. In certain embodiments, the nucleotide immediately 5′ of the integrated exogenous sequence is a nucleotide within a sequence of nucleotides at least about 50%, at least about 60%, at least about 70%, at least about 80%, at least about 90%, at least about 95%, at least about 99%, or at least about 99.9% homologous to nucleotides 41190-45269 of NW_006874047.1, nucleotides 63590-207911 of NW_006884592.1, nucleotides 253831-491909 of NW_006881296.1, nucleotides 69303-79768 of NW_003616412.1, nucleotides 293481-315265 of NW_003615063.1, nucleotides 2650443-2662054 of NW_006882936.1, or nucleotides 82214-97705 of NW_003615411.1.

[0104] In certain embodiments, the nucleotide immediately 3′ of the integrated exogenous sequence is a nucleotide within the sequence of nucleotides 45270-45490 of NW_006874047.1, nucleotides 207912-792374 of NW_006884592.1, nucleotides 491910-667813 of NW_006881296.1, nucleotides 79769-100059 of NW_003616412.1, nucleotides 315266-362442 of NW_003615063.1, nucleotides 2662055-2701768 of NW_006882936.1, or nucleotides 97706-105117 of NW_003615411.1. In certain embodiments, the nucleotide immediately 3′ of the integrated exogenous sequence is a nucleotide within a sequence of nucleotides at least 50% homologous to nucleotides 45270-45490 of NW_006874047.1, nucleotides 207912-792374 of NW_006884592.1, nucleotides 491910-667813 of NW_006881296.1, nucleotides 79769-100059 of NW_003616412.1, nucleotides 315266-362442 of NW_003615063.1, nucleotides 2662055-2701768 of NW_006882936.1, or nucleotides 97706-105117 of NW_003615411.1. In certain embodiments, the nucleotide immediately 3′ of the integrated exogenous sequence is a nucleotide within a sequence of nucleotides at least about 50%, at least about 60%, at least about 70%, at least about 80%, at least about 90%, at least about 95%, at least about 99%, or at least about 99.9% homologous to nucleotides 45270-45490 of NW_006874047.1, nucleotides 207912-792374 of NW_006884592.1, nucleotides 491910-667813 of NW_006881296.1, nucleotides 79769-100059 of NW_003616412.1, nucleotides 315266-362442 of NW_003615063.1, nucleotides 2662055-2701768 of NW_006882936.1, or nucleotides 97706-105117 of NW_003615411.1.

[0105] In certain embodiments, the integrated exogenous nucleotide sequence is operably linked to a nucleotide sequence selected from the group consisting of SEQ ID. Nos. 1-7 and sequences at least 50% homologous thereto. In certain embodiments, the nucleotide sequence operably linked to the exogenous nucleotide sequence is at least about 50%, at least about 60%, at least about 70%, at least about 80%, at least about 90%, at least about 95%, at least about 99%, or at least about 99.9% homologous to a sequence selected from SEQ ID Nos. 1-7.

[0106] In certain embodiments, the integrated exogenous sequence is flanked 5′ by a nucleotide sequence selected from the group consisting of nucleotides 41190-45269 of NW_006874047.1, nucleotides 63590-207911 of NW_006884592.1, nucleotides 253831-491909 of NW_006881296.1, nucleotides 69303-79768 of NW_003616412.1, nucleotides 293481-315265 of NW_003615063.1, nucleotides 2650443-2662054 of NW_006882936.1, and nucleotides 82214-97705 of NW_003615411.1.and sequences at least 50% homologous thereto, and is flanked 3′ by a nucleotide sequence selected from the group consisting of nucleotides 45270-45490 of NW_006874047.1, nucleotides 207912-792374 of NW_006884592.1, nucleotides 491910-667813 of NW_006881296.1, nucleotides 79769-100059 of NW_003616412.1, nucleotides 315266-362442 of NW_003615063.1, nucleotides 2662055-2701768 of NW_006882936.1, and nucleotides 97706-105117 of NW_003615411.1 and sequences at least 50% homologous thereto. In certain embodiments, the nucleotide sequence flanking 5′ of the integrated exogenous nucleotide sequence is at least about 50%, at least about 60%, at least about 70%, at least about 80%, at least about 90%, at least about 95%, at least about 99%, or at least about 99.9% homologous to nucleotides 41190-45269 of NW_006874047.1, nucleotides 63590-207911 of NW_006884592.1, nucleotides 253831-491909 of NW_006881296.1, nucleotides 69303-79768 of NW_003616412.1, nucleotides 293481-315265 of NW_003615063.1, nucleotides 2650443-2662054 of NW_006882936.1, and nucleotides 82214-97705 of NW_003615411.1, and the nucleotide sequences flanking 3′ of the integrated exogenous nucleotide sequence is at least about 50%, at least about 60%, at least about 70%, at least about 80%, at least about 90%, at least about 95%, at least about 99%, or at least about 99.9% homologous to SEQ ID Nos. nucleotides 45270-45490 of NW_006874047.1, nucleotides 207912-792374 of NW_006884592.1, nucleotides 491910-667813 of NW_006881296.1, nucleotides 79769-100059 of NW_003616412.1, nucleotides 315266-362442 of NW_003615063.1, nucleotides 2662055-2701768 of NW_006882936.1, and nucleotides 97706-105117 of NW_003615411.1.

[0107] In certain embodiments, the integrated exogenous nucleotide sequence is integrated within a 20 nucleotide sequence at least about 50%, at least about 60%, at least about 70%, at least about 80%, at least about 90%, at least about 95%, at least about 99%, or at least about 99.9% homologous to a 20 nucleotide sequence: of NW_006874047.1 comprising position 45269; of NW_006884592.1 comprising position 207911; of NW_006881296.1 comprising position 491909; of NW_003616412.1 comprising position 79768; of NW_003615063.1 comprising position 315265; of NW_006882936.1 comprising position 2662054; and of NW_003615411.1 comprising position 97705.

[0108] In certain embodiments, the integrated exogenous nucleotide sequence is integrated within a 50 nucleotide sequence at least about 50%, at least about 60%, at least about 70%, at least about 80%, at least about 90%, at least about 95%, at least about 99%, or at least about 99.9% homologous to a 50 nucleotide sequence: of NW_006874047.1 comprising position 45269; of NW_006884592.1 comprising position 207911; of NW_006881296.1 comprising position 491909; of NW_003616412.1 comprising position 79768; of NW_003615063.1 comprising position 315265; of NW_006882936.1 comprising position 2662054; and of NW_003615411.1 comprising position 97705.

[0109] In certain embodiments, the integrated exogenous nucleotide sequence is integrated within a 100 nucleotide sequence at least about 50%, at least about 60%, at least about 70%, at least about 80%, at least about 90%, at least about 95%, at least about 99%, or at least about 99.9% homologous to a 100 nucleotide sequence: of NW_006874047.1 comprising position 45269; of NW_006884592.1 comprising position 207911; of NW_006881296.1 comprising position 491909; of NW_003616412.1 comprising position 79768; of NW_003615063.1 comprising position 315265; of NW_006882936.1 comprising position 2662054; and of NW_003615411.1 comprising position 97705.

[0110] In certain embodiments, the integrated exogenous nucleotide sequence is integrated within a 200 nucleotide sequence at least about 50%, at least about 60%, at least about 70%, at least about 80%, at least about 90%, at least about 95%, at least about 99%, or at least about 99.9% homologous to a 200 nucleotide sequence: of NW_006874047.1 comprising position 45269; of NW_006884592.1 comprising position 207911; of NW_006881296.1 comprising position 491909; of NW_003616412.1 comprising position 79768; of NW_003615063.1 comprising position 315265; of NW_006882936.1 comprising position 2662054; and of NW_003615411.1 comprising position 97705.

[0111] In certain embodiments, the integrated exogenous nucleotide sequence is integrated within a 500 nucleotide sequence at least about 50%, at least about 60%, at least about 70%, at least about 80%, at least about 90%, at least about 95%, at least about 99%, or at least about 99.9% homologous to a 500 nucleotide sequence: of NW_006874047.1 comprising position 45269; of NW_006884592.1 comprising position 207911; of NW_006881296.1 comprising position 491909; of NW_003616412.1 comprising position 79768; of NW_003615063.1 comprising position 315265; of NW_006882936.1 comprising position 2662054; and of NW_003615411.1 comprising position 97705.

[0112] In certain embodiments, the integrated exogenous nucleotide sequence is integrated within a 1000 nucleotide sequence at least about 50%, at least about 60%, at least about 70%, at least about 80%, at least about 90%, at least about 95%, at least about 99%, or at least about 99.9% homologous to a 1000 nucleotide sequence: of NW_006874047.1 comprising position 45269; of NW_006884592.1 comprising position 207911; of NW_006881296.1 comprising position 491909; of NW_003616412.1 comprising position 79768; of NW_003615063.1 comprising position 315265; of NW_006882936.1 comprising position 2662054; and of NW_003615411.1 comprising position 97705.

[0113] In certain embodiments, the integrated exogenous nucleotide sequence is integrated into a locus immediately adjacent to all or a portion of a sequence selected from the group consisting of sequences at least about 90% homologous to a sequence selected from SEQ ID Nos. 1-7.

[0114] In certain embodiments, the integrated exogenous nucleotide sequence is adjacent to a nucleotide sequence selected from the group consisting of SEQ ID. Nos. 1-7 and sequences at least 50% homologous thereto. In certain embodiments, the integrated exogenous nucleotide sequence is within about 100 bp, about 200 bp, about 500 bp, about 1 kb distance from a sequence selected from the group consisting of SEQ ID. Nos. 1-7 and sequences at least 50% homologous thereto.

[0115] In certain embodiments, the nucleotide sequence adjacent to the exogenous nucleotide sequence is at least about 50%, at least about 60%, at least about 70%, at least about 80%, at least about 90%, at least about 95%, at least about 99%, or at least about 99.9% homologous to a sequence selected from SEQ ID Nos. 1-7.

[0116] In certain embodiments, the exogenous nucleotide sequence is integrated at an integration site adjacent to a position selected from nucleotides numbered 1-1,000 bp; 1,000-2,000 bp; 2,000-3,000 bp; 3,000-4,000 bp; and 4,000-4,301 bp of SEQ ID No. 1. In certain embodiments, the exogenous nucleotide sequence is integrated at an integration site adjacent to a position selected from nucleotides numbered 1-100,000 bp; 100,000-200,000 bp; 200,000-300,000 bp; 300,000-400,000 bp; 400,000-500,000 bp; 500,000-600,000 bp; 600,000-700,000 bp; and 700,000-728785 bp of SEQ ID No. 2. In certain embodiments, the exogenous nucleotide sequence is integrated at an integration site adjacent to a position selected from nucleotides numbered 1-100,000 bp; 100,000-200,000 bp; 200,000-300,000 bp; 300,000-400,000 bp; and 400,000-413,983 of SEQ ID No. 3. In certain embodiments, the exogenous nucleotide sequence is integrated at an integration site adjacent to a position selected from nucleotides numbered 1-10,000 bp; 10,000-20,000 bp; 20,000-30,000 bp; and 30,000-30,757 bp of SEQ ID No. 4. In certain embodiments, the exogenous nucleotide sequence is integrated at an integration site adjacent to a position selected from nucleotides numbered 1-10,000 bp; 10,000-20,000 bp; 20,000-30,000 bp; 30,000-40,000 bp; 40,000-50,000 bp; 50,000-60,000 bp; and 60,000-68,962 bp of SEQ ID No. 5. In certain embodiments, the exogenous nucleotide sequence is integrated at an integration site adjacent to a position selected from nucleotides numbered 1-10,000 bp; 10,000-20,000 bp; 20,000-30,000 bp; 30,000-40,000 bp; 40,000-50,000 bp; and 50,000-51,326 bp of SEQ ID No. 6. In certain embodiments, the exogenous nucleotide sequence is integrated at an integration site adjacent to a position selected from nucleotides numbered 1-10,000 bp; 10,000-20,000 bp; and 20,000-22,904 bp of SEQ ID No. 7.

[0117] In certain embodiments, the locus comprising the integration site of the exogenous nucleotide sequence does not encode an open reading frame (ORF). In certain embodiments, the locus comprising the integration site of the exogenous nucleotide sequence includes cis-acting elements, e.g., promoters and enhancers. In certain embodiments, the locus comprising the integration site of the exogenous nucleotide sequence is free of any cis-acting elements, e.g., promoters and enhancers, that enhance gene expression.

[0118] In certain embodiments, an exogenous nucleotide sequence is integrated at an integration site within an endogenous gene selected from the group consisting of LOC107977062, LOC100768845, ITPR2, ERE67000.1, UBAP2, MTMR2, and XP_003512331.2. The endogenous LOC107977062, LOC100768845, ITPR2, ERE67000.1, UBAP2, MTMR2, and XP_003512331.2 genes include the wild-type and all homologous sequences of LOC107977062, LOC100768845, ITPR2, ERE67000.1, UBAP2, MTMR2, and XP_003512331.2 genes. In certain embodiments, the homologous sequences of LOC107977062, LOC100768845, ITPR2, ERE67000.1, UBAP2, MTMR2, and XP_003512331.2 genes can be at least about 50%, at least about 60%, at least about 70%, at least about 80%, at least about 90%, at least about 95%, at least about 99%, or at least about 99.9% homologous to the wild-type LOC107977062, LOC100768845, ITPR2, ERE67000.1, UBAP2, MTMR2, and XP_003512331.2 genes. In certain embodiments, the LOC107977062, LOC100768845, ITPR2, ERE67000.1, UBAP2, MTMR2, and XP_003512331.2 genes are wild-type mammalian LOC107977062, LOC100768845, ITPR2, ERE67000.1, UBAP2, MTMR2, and XP_003512331.2 genes. In certain embodiments, the LOC107977062, LOC100768845, ITPR2, ERE67000.1, UBAP2, MTMR2, and XP_003512331.2 genes are wild-type human LOC107977062, LOC100768845, ITPR2, ERE67000.1, UBAP2, MTMR2, and XP_003512331.2 genes. In certain embodiments, the LOC107977062, LOC100768845, ITPR2, ERE67000.1, UBAP2, MTMR2, and XP_003512331.2 genes are wild-type hamster LOC107977062, LOC100768845, ITPR2, ERE67000.1, UBAP2, MTMR2, and XP_003512331.2 genes.

[0119] In certain embodiments, the integration site is operably linked to an endogenous gene selected from the group consisting of LOC107977062, LOC100768845, ITPR2, ERE67000.1, UBAP2, MTMR2, XP_003512331.2, and at least about 90% homologous sequences thereof. In certain embodiments, the integration site is flanked by an endogenous gene selected from the group consisting of LOC107977062, LOC100768845, ITPR2, ERE67000.1, UBAP2, MTMR2, XP_003512331.2, and at least about 90% homologous sequences thereof.

[0120] Table 1 provides exemplary TI host cell integration sites:

TABLE 1
TI host cell integration sites

| | | Contig | | |
|---|---|---|---|---|
| | | Size | Integration | Gene |
| Host | Contig | (kb) | site (bp) | (SEQ ID No.) |
| 1 | NW_006874047.1 | 727 | 45269 | LOC107977062 |
| | | | | (SEQ ID No. 1) |
| 2 | NW_006884592.1 | 931 | 207911 | LOC100768845 |
| | | | | (SEQ ID No. 2) |
| 3 | NW_006881296.1 | 1016 | 491909 | ITPR2 |
| | | | | (SEQ ID No. 3) |
| 4 | NW_003616412.1 | 127 | 79768 | ERE67000.1 |
| | | | | (SEQ ID No. 4) |
| 5 | NW_003615063.1 | 372 | 315265 | UBAP2 |
| | | | | (SEQ ID No. 5) |
| 6 | NW_006882936.1 | 3042 | 2662054 | MTMR2 |
| | | | | (SEQ ID No. 6) |
| 7 | NW_003615411.1 | 277 | 97706 | XP_003512331.2 |
| | | | | (SEQ ID No. 7) |

[0121] In certain embodiments, an integration site and/or the nucleotide sequences flanking the integration site can be identified experimentally. In certain embodiments, an integration site and/or the nucleotide sequences flanking the integration site can be identified by genome-wide screening approaches to isolate host cells that express, at a desirable level, a polypeptide of interest encoded by one or more SOIs integrated into one or more exogenous nucleotide sequences, where the exogenous sequences are themselves integrated into one or more loci in the genome of the host cell. In certain embodiments, an integration site and/or the nucleotide sequences flanking an integration site can be identified by genome-wide screening approaches following transposase-based cassette integration event. In certain embodiments, an integration site and/or the nucleotide sequences flanking an integration site can be identified by brute force random integration screening. In certain embodiments, an integration site and/or the nucleotide sequences flanking an integration site can be determined by conventional sequencing approaches such as target locus amplification (TLA) followed by next-generation sequencing (NGS) and whole-genome NGS. In certain embodiments, the location of an integration site on a chromosome can be determined by conventional cell biology approaches such as fluorescence in-situ hybridization (FISH) analysis.

[0122] In certain embodiments, a TI host cell comprises a first exogenous nucleotide sequence integrated at a first integration site within a specific first locus in the genome of the TI host cell and a second exogenous nucleotide sequence integrated at a second integration site within a specific second locus in the genome. In certain embodiments, a TI host cell comprises multiple exogenous nucleotide sequences integrated at multiple integration sites in the genome of the TI host cell.

[0123] In certain embodiments, the TI host cells of the present disclosure comprise at least two distinct exogenous nucleotide sequences, e.g., exogenous nucleotide sequences comprising at least one RRS. In certain embodiments, the two or more exogenous nucleotide sequences can be targeted for the introduction of one or more SOIs. In certain embodiments the SOIs are the same. In certain embodiments, the SOIs are distinct. In certain embodiments, a parental TI host cell comprising a first exogenous nucleotide sequence can comprise a second exogenous nucleotide sequence at an integration site that is different from the integration site of the first exogenous nucleotide sequence.

[0124] In certain embodiments, the integration sites can be on the same chromosome. In certain embodiments, the integration sites are located within 1-1,000 nucleotides, 1,000-100,000 nucleotides, 100,000-1,000,000 nucleotides or more from each other in the same chromosome. In certain embodiments the integration sites are on different chromosomes. In certain embodiments, a TI host cell comprising an exogenous nucleotide sequence at one integration site can be used for the insertion of at least two, at least three, at least four, at least five, at least six, at least 7, at least 8, or more exogenous nucleotide sequences at the same or different integration sites.

[0125] In certain embodiments, the feasibility of recombinase-mediated cassette exchange (RMCE) of at least two integration sites can be evaluated for each site individually. In certain embodiments, the feasibility of RMCE at least two integration sites can be evaluated simultaneously. The feasibility of RMCE at multiple sites can evaluated by methods known in the art, e.g., measuring the polypeptide titer, or the polypeptide specific production. In certain embodiments, the evaluation can be performed by methods known in the art, e.g., by evaluating the titer and/or specific productivity of a culture of the TI host cell expressing the SOI(s). Exemplary culture strategies include, but are not limited to, fed-batch shake flask cultures and a bioreactor fed-batch cultures. Titer and specific productivity of the TI host cells expressing a polypeptide of interest can evaluated by methods known in the art, e.g., but not limited to, ELISA, FACS, Fluorometric Microvolume Assay Technology (FMAT), protein-A affinity chromatography, Western blot analysis.

### 3.2 Reduced or Eliminated Expression of Endogenous Host Cell Proteins

[0126] In certain embodiments, the present disclosure relates to modified CHO cells, e.g., CHO cells, where the expression of one or more CHO cell endogenous proteins is reduced or eliminated. For example, but not by way of limitation, methods for reducing or eliminating endogenous protein expression in a CHO cell include: (1) modification of a gene coding for the endogenous protein or component thereof, e.g., by introducing a deletion, insertion, substitution, or combination thereof into the gene; (2) reducing or eliminating the transcription and/or stability of the mRNA encoding the endogenous protein or a component thereof, and (3) reducing or eliminating the translation of the mRNA encoding the endogenous protein or a component thereof. In certain embodiments, the reduction or elimination of protein expression is obtained by targeted genome editing. For example, CRISPR/Cas9-based genome editing can be employed to modify one or more target genes, resulting in the reduction or elimination of expression of the gene (or genes) targeted for editing.

[0127] In certain embodiments, one or more of the CHO cell endogenous proteins targeted for reduced or eliminated expression are selected based on their role in promoting apoptosis. As apoptosis can decrease culture viability and productivity, reducing or eliminating expression of such proteins can positively impact culture viability and productivity. For example, but not by way of limitation, the CHO cell protein selected based on its role in promoting apoptosis is BCL2 Associated X, Apoptosis Regulator (BAX) or BCL2 Antagonist/Killer 1 (BAK). In certain embodiments, the CHO cells of the present disclosure exhibit reduced or eliminated expression of BAX. In certain embodiments, the CHO cells of the present disclosure exhibit reduced or eliminated expression of BAK. In certain embodiments, the CHO cells of the present disclosure exhibit reduced or eliminated expression of BAX and BAK.

[0128] In certain embodiments, the CHO cell endogenous product targeted for reduced or eliminated expression is selected based on its role in promoting clumping and/or aggregation during cell culture. When CHO cells are used for production of a recombinant protein of interest, such clumping and/or aggregation during cell culture can lead to reduced protein titers due to the negative impact of clumping and/or aggregation on CHO cell viability. For example, but not by way of limitation, the CHO cell endogenous protein selected based on its role in promoting clumping and/or aggregation during cell culture is Intercellular Adhesion Molecule 1 (ICAM-1). In certain embodiments, the CHO cells of the present disclosure exhibit reduced or eliminated expression of ICAM-1.

[0129] In certain embodiments, the CHO cell endogenous protein that is targeted for reduced or eliminated expression is an endogenous protein that is selected based on its role in regulating the unfolded protein response (UPR). For example, but not by way of limitation, the cellular protein selected based on its role in regulating the UPR is inositol-requiring enzyme 1 (IRE1), protein kinase R-like ER kinase (PERK) or activating transcription factor 6 (ATF6). In certain embodiments, the modified cells of the present disclosure exhibit reduced or eliminated expression of PERK. In certain embodiments, PERK, as used herein, refers to a eukaryotic PERK cellular protein, e.g., the CHO PERK cellular protein (Gene ID: 100765343; GenBank: EGW03658.1; and isoforms NCBI Reference Sequence: XP_027285344.2 and NCBI Reference Sequence: XP_016831844.1), and functional variants thereof. In certain embodiments, functional variants of PERK, as used herein encompass PERK sequence variants having 50%, 55%, 60%, 65%, 70%, 75%, 80%, 85%, 90%, 91%, 92%, 93%, 94%, 95%, 96%, 97%, 98%, 99% identity to the wild type PERK sequence of the modified cell used for the production of a recombinant protein of interest.

[0130] In certain embodiments, one or more of the CHO cell endogenous proteins targeted for reduced or eliminated expression are selected based on their role in promoting inefficient cell growth. CHO cells express many endogenous proteins that are not essential for cell growth, survival, and/or productivity. Because expression of these endogenous proteins consumes considerable cellular energy and DNA/protein building blocks, reducing or eliminating the expression of such endogenous proteins can render cell growth more efficient and, in the case of cells used to produce a recombinant protein of interest, those cellular resources can be diverted to achieve higher productivity of the recombinant protein of interest. For example, but not by way of limitation, the CHO cell endogenous protein selected based on its role in promoting efficient cell growth and higher productivity of a recombinant protein of interest is BAX, BAK, ICAM-1, PERK, Sirtuin 1 (SIRT-1) or MYC Proto-Oncogene, BHLH Transcription Factor (MYC). In certain embodiments, the CHO cells of the present disclosure exhibit reduced or eliminated expression of SIRT-1. In certain embodiments, the CHO cells of the present disclosure exhibit reduced or eliminated expression of PERK. In certain embodiments, the CHO cells of the present disclosure exhibit reduced or eliminated expression of MYC. In certain embodiments, the CHO cells of the present disclosure exhibit reduced or eliminated expression of SIRT-1 and MYC. In certain embodiments, the CHO cells of the present disclosure exhibit reduced or eliminated expression of BAX and MYC. In certain embodiments, the CHO cells of the present disclosure exhibit reduced or eliminated expression of BAK and MYC. In certain embodiments, the CHO cells of the present disclosure exhibit reduced or eliminated expression of ICAM-1 and MYC. In certain embodiments, the CHO cells of the present disclosure exhibit reduced or eliminated expression of BAX and SIRT-1. In certain embodiments, the CHO cells of the present disclosure exhibit reduced or eliminated expression of BAK and SIRT-1. In certain embodiments, the CHO cells of the present disclosure exhibit reduced or eliminated expression of ICAM-1 and SIRT-1. In certain embodiments, the CHO cells of the present disclosure exhibit reduced or eliminated expression of BAX, SIRT-1, and MYC. In certain embodiments, the CHO cells of the present disclosure exhibit reduced or eliminated expression of BAK, SIRT-1, and MYC. In certain embodiments, the CHO cells of the present disclosure exhibit reduced or eliminated expression of ICAM-1, SIRT-1, and MYC. In certain embodiments, the CHO cells of the present disclosure exhibit reduced or eliminated expression of BAX, BAK, SIRT-1, and MYC. In certain embodiments, the CHO cells of the present disclosure exhibit reduced or eliminated expression of BAX, ICAM-1, SIRT-1, and MYC. In certain embodiments, the CHO cells of the present disclosure exhibit reduced or eliminated expression of BAK, ICAM-1, SIRT-1, and MYC. In certain embodiments, the CHO cells of the present disclosure exhibit reduced or eliminated expression of BAX, BAK, MYC, SIRT-1, and ICAM. In certain embodiments, the CHO cells of the present disclosure exhibit reduced or eliminated expression of BAX, BAK, ICAM-1, PERK, SIRT-1, and/or MYC.

[0131] In certain embodiments, the CHO cell endogenous protein that is targeted for reduced or eliminated expression is an endogenous protein that can promote non-human glycosylation patterns in a recombinant protein product, e.g., when the cell is used for recombinant protein production. Such non-human glycosylation patterns can include the addition of Galactose-α-1,3-galactose (αGAL) and/or N-glycolylneuraminic acid (NGNA). For example, but not by way of limitation, the CHO cell protein selected based on its role in promoting non-human glycosylation patterns is Glycoprotein Alpha-Galactosyltransferase 1 (GGTA1), which promotes αGAL addition, or Cytidine Monophosphate-N-Acetylneuraminic Acid Hydroxylase (CMAH), which promotes NGNA addition. In certain embodiments, the CHO cells of the present disclosure exhibit reduced or eliminated expression of GGTA1. In certain embodiments, the CHO cells of the present disclosure exhibit reduced or eliminated expression of CMAH. In certain embodiments, the CHO cells of the present disclosure exhibit reduced or eliminated expression of GGTA1 and CMAH.

[0132] In certain embodiments, the CHO cell endogenous protein that is targeted for reduced or eliminated expression is an endogenous protein that promotes the catabolism of branched chain amino acids (BCAAs). While branched chain amino acids, e.g., leucine, isoleucine, and valine, are essential amino acids and are thus generally included in chemically defined media employed in CHO cell culture, the catabolism of BCAAs can lead to toxic intermediates and metabolites that decrease cell growth, productivity and protein quality. For example, the CHO cell protein selected based on its role in promoting BCAA catabolism is Branched chain keto acid dehydrogenase E1 alpha subunit (BCKDHA) or Branched-chain alpha-keto acid dehydrogenase E1 beta subunit (BCKDHB).

[0133] In contexts where the cell is used for production of a recombinant protein of interest, certain CHO cell endogenous proteins can co-purify with the protein of interest, leading to increased costs associated with additional purification processes and/or decreased shelf-life of the resulting recombinant product. For example, certain residual host cell proteins that co-purify with the recombinant protein of interest can degrade polysorbate used as a surfactant in the final drug product, and lead to particle formation. Thus, in certain embodiments, the CHO cell endogenous host cell proteins targeted for reduced or eliminated expression based on their potential to co-purify with the recombinant protein of interest and degrade polysorbate used as a surfactant in the final drug product include Lipoprotein lipase (LPL) which is also referred to as LPL1; Phospholipase A2 group (LPLA2) which is also referred to as PLA2G7; Palmitoyl-protein thioesterase 1 (PPT1); or Lipase A (Lysosomal acid lipase/cholesteryl ester hydrolase, Lipase) (LIPA). In certain embodiments, the CHO cells of the present disclosure exhibit reduced or eliminated expression of PPT1. In certain embodiments, the CHO cells of the present disclosure exhibit reduced or eliminated expression of PPT1 and LPL. In certain embodiments, the CHO cells of the present disclosure exhibit reduced or eliminated expression of LPLA2. In certain embodiments, the CHO cells of the present disclosure exhibit reduced or eliminated expression of PPT1 and LIPA. In certain embodiments, the CHO cells of the present disclosure exhibit reduced or eliminated expression of PPT1, LPL and LPLA2. In certain embodiments, the CHO cells of the present disclosure exhibit reduced or eliminated expression of PPT1, LPL and LIPA. In certain embodiments, the CHO cells of the present disclosure exhibit reduced or eliminated expression of PPT1, LIPA and LPLA2. In certain embodiments, the CHO cells of the present disclosure exhibit reduced or eliminated expression of PPT1, LPL, LIPA, and LPLA2.

[0134] In certain embodiments, the host cells of the present disclosure exhibit reduced or eliminated expression of one or more endogenous proteins in order to facilitate purification of a recombinant protein of interest by reducing the overall amount of host cell endogenous protein produced during cell culture. Such reduction in overall host cell endogenous protein production can reduce the burden on the chromatographic and other materials and systems employed in the purification process, thereby reducing the overall cost of purification and increasing purification process efficiency. For example, but not by way of limitation, the host cell endogenous protein targeted for reduced or eliminated expression based on the overall amount of the endogenous protein produced during cell culture is selected from the following endogenous product: MYC Proto-Oncogene, BHLH Transcription Factor (MYC); BCL2 Associated X, Apoptosis Regulator (BAX); BCL2 Antagonist/Killer 1 (BAK); Intercellular Adhesion Molecule 1 (ICAM-1); Protein Kinase R-like ER Kinase (PERK); Sirtuin 1 (SIRT-1); Glycoprotein Alpha-Galactosyltransferase 1 (GGTA1); Cytidine Monophosphate-N-Acetylneuraminic Acid Hydroxylase (CMAH); Lipoprotein lipase (LPL); Phospholipase A2 group (LPLA2); Palmitoyl-protein thioesterase 1 (PPT1); Branched Chain Keto Acid Dehydrogenase E1 alpha subunit (BCKDHA); Branched Chain Keto Acid Dehydrogenase E1 beta subunit (BCKDHB); and Lipase A (Lysosomal acid lipase/cholesteryl ester hydrolase, Lipase) (LIPA).

[0135] In certain embodiments, the host cells of the present disclosure exhibit reduced or eliminated expression of the following endogenous proteins: BAX; BAK; ICAM-1; GGTA1; CMAH; LPL; LPLA2; and PPT1.

[0136] In certain embodiments, the host cells of the present disclosure exhibit reduced or eliminated expression of the following endogenous proteins: BAX; BAK; ICAM-1; SIRT-1; GGTA1; CMAH; LPL; LPLA2; and PPT1.

[0137] In certain embodiments, the host cells of the present disclosure exhibit reduced or eliminated expression of the following endogenous proteins: BAX; BAK; ICAM-1; SIRT-1; MYC; GGTA1; CMAH; LPL; LPLA2; and PPT1.

[0138] In certain embodiments, the host cells of the present disclosure exhibit reduced or eliminated expression of the following endogenous proteins: BAX; BAK; ICAM-1; SIRT-1; MYC; GGTA1; CMAH; LPL, LPLA2; PPT1; and LIPA.

[0139] In certain embodiments, the host cells of the present disclosure exhibit reduced or eliminated expression of the following endogenous proteins: BAX; BAK; ICAM-1; GGTA1; CMAH; LPLA2; PPT1; and LIPA.

[0140] In certain embodiments, the host cells of the present disclosure exhibit reduced or eliminated expression of the following endogenous proteins: BAX; BAK; ICAM-1; SIRT-1; GGTA1; CMAH; LPLA2; PPT1; and LIPA.

[0141] In certain embodiments, the host cells of the present disclosure exhibit reduced or eliminated expression of the following endogenous proteins: BAX; BAK; ICAM-1; SIRT-1; MYC; GGTA1; CMAH; LPLA2; PPT1; and LIPA.

[0142] In certain embodiments, the host cells of the present disclosure exhibit reduced or eliminated expression of the following endogenous proteins: BAX; BAK; ICAM-1; LPL; LPLA2; and PPT1.

[0143] In certain embodiments, the host cells of the present disclosure exhibit reduced or eliminated expression of the following endogenous proteins: BAX; BAK; ICAM-1; SIRT-1; LPL, LPLA2; and PPT1.

[0144] In certain embodiments, the host cells of the present disclosure exhibit reduced or eliminated expression of the following endogenous proteins: BAX; BAK; ICAM-1; SIRT-1; MYC; LPL; LPLA2; and PPT1.

[0145] In certain embodiments, the host cells of the present disclosure exhibit reduced or eliminated expression of the following endogenous proteins: BAX; BAK; ICAM-1; SIRT-1; MYC; LPL; LPLA2; PPT1; and LIPA.

[0146] In certain embodiments, the host cells of the present disclosure exhibit reduced or eliminated expression of the following endogenous proteins: BAX; BAK; ICAM-1; PERK; SIRT-1; and MYC.

[0147] In certain embodiments, the host cells of the present disclosure exhibit reduced or eliminated expression of the following endogenous proteins: MYC; BAX; BAK; ICAM-1; PERK; SIRT-1; GGTA1; CMAH; LPL; LPLA2; PPT1 and LIPA.

[0148] In certain embodiments, the host cells of the present disclosure exhibit reduced or eliminated expression of the following endogenous proteins: BAX; BAK; and PERK.

[0149] In certain embodiments, the host cells of the present disclosure exhibit reduced or eliminated expression of the following endogenous proteins: BAX; BAK; MYC; SIRT-1; and ICAM.

[0150] In certain embodiments, the host cells of the present disclosure exhibit reduced or eliminated expression of the following endogenous proteins: BAX; BAK; LPL; LPLA2; GGTA1; and CMAH.

[0151] In certain embodiments, the host cells of the present disclosure exhibit reduced or eliminated expression of the following endogenous proteins: BAX; BAK; PERK; LPL; LPLA2; GGTA1; and CMAH.

[0152] In certain embodiments, the host cells of the present disclosure exhibit reduced or eliminated expression of the following endogenous proteins: BAX; BAK; MYC; LPL; LPLA2; GGTA1; and CMAH.

[0153] In certain embodiments, the host cells of the present disclosure exhibit reduced or eliminated expression of the following endogenous proteins: BAX; BAK; MYC; PERK; LPL; LPLA2; GGTA1; and CMAH.

[0154] In certain embodiments, the host cells of the present disclosure exhibit reduced or eliminated expression of the following endogenous proteins: BAX; BAK; LPL; LPLA2; GGTA1; CMAH; and PPT1.

[0155] In certain embodiments, the host cells of the present disclosure exhibit reduced or eliminated expression of the following endogenous proteins: BAX; BAK; PERK; LPL; LPLA2; GGTA1; CMAH; and PPT1.

[0156] In certain embodiments, the host cells of the present disclosure exhibit reduced or eliminated expression of the following endogenous proteins: BAX; BAK; MYC; LPL; LPLA2; GGTA1; CMAH; and PPT1.

[0157] In certain embodiments, the host cells of the present disclosure exhibit reduced or eliminated expression of the following endogenous proteins: BAX; BAK; MYC; PERK; LPL; LPLA2; GGTA1; CMAH; and PPT1.

[0158] In certain embodiments, the host cells of the present disclosure exhibit reduced or eliminated expression of the following endogenous proteins: BAX; BAK; BCKDHA; ICAM-1; GGTA1; CMAH; LPL; LPLA2; and PPT1.

[0159] In certain embodiments, the host cells of the present disclosure exhibit reduced or eliminated expression of the following endogenous proteins: BAX; BAK; BCKDHA; ICAM-1; SIRT-1; GGTA1; CMAH; LPL; LPLA2; and PPT1.

[0160] In certain embodiments, the host cells of the present disclosure exhibit reduced or eliminated expression of the following endogenous proteins: BAX; BAK; BCKDHA; ICAM-1; SIRT-1; MYC; GGTA1; CMAH; LPL; LPLA2; and PPT1.

[0161] In certain embodiments, the host cells of the present disclosure exhibit reduced or eliminated expression of the following endogenous proteins: BAX; BAK; BCKDHA; ICAM-1; SIRT-1; MYC; GGTA1; CMAH; LPL, LPLA2; PPT1; and LIPA.

[0162] In certain embodiments, the host cells of the present disclosure exhibit reduced or eliminated expression of the following endogenous proteins: BAX; BAK; BCKDHA; ICAM-1; GGTA1; CMAH; LPLA2; PPT1; and LIPA.

[0163] In certain embodiments, the host cells of the present disclosure exhibit reduced or eliminated expression of the following endogenous proteins: BAX; BAK; BCKDHA; ICAM-1; SIRT-1; GGTA1; CMAH; LPLA2; PPT1; and LIPA.

[0164] In certain embodiments, the host cells of the present disclosure exhibit reduced or eliminated expression of the following endogenous proteins: BAX; BAK; BCKDHA; ICAM-1; SIRT-1; MYC; GGTA1; CMAH; LPLA2; PPT1; and LIPA.

[0165] In certain embodiments, the host cells of the present disclosure exhibit reduced or eliminated expression of the following endogenous proteins: BAX; BAK; BCKDHA; ICAM-1; LPL; LPLA2; and PPT1.

[0166] In certain embodiments, the host cells of the present disclosure exhibit reduced or eliminated expression of the following endogenous proteins: BAX; BAK; BCKDHA; ICAM-1; SIRT-1; LPL, LPLA2; and PPT1.

[0167] In certain embodiments, the host cells of the present disclosure exhibit reduced or eliminated expression of the following endogenous proteins: BAX; BAK; BCKDHA; ICAM-1; SIRT-1; MYC; LPL; LPLA2; and PPT1.

[0168] In certain embodiments, the host cells of the present disclosure exhibit reduced or eliminated expression of the following endogenous proteins: BAX; BAK; BCKDHA; ICAM-1; SIRT-1; MYC; LPL; LPLA2; PPT1; and LIPA.

[0169] In certain embodiments, the host cells of the present disclosure exhibit reduced or eliminated expression of the following endogenous proteins: BAX; BAK; BCKDHA; ICAM-1; PERK; SIRT-1; and MYC.

[0170] In certain embodiments, the host cells of the present disclosure exhibit reduced or eliminated expression of the following endogenous proteins: MYC; BAX; BAK; BCKDHA; ICAM-1; PERK; SIRT-1; GGTA1; CMAH; LPL; LPLA2; PPT1 and LIPA.

[0171] In certain embodiments, the host cells of the present disclosure exhibit reduced or eliminated expression of the following endogenous proteins: BAX; BAK; BCKDHA; and PERK.

[0172] In certain embodiments, the host cells of the present disclosure exhibit reduced or eliminated expression of the following endogenous proteins: BAX; BAK; BCKDHA; MYC; SIRT-1; and ICAM.

[0173] In certain embodiments, the host cells of the present disclosure exhibit reduced or eliminated expression of the following endogenous proteins: BAX; BAK; BCKDHA; LPL; LPLA2; GGTA1; and CMAH.

[0174] In certain embodiments, the host cells of the present disclosure exhibit reduced or eliminated expression of the following endogenous proteins: BAX; BAK; BCKDHA; PERK; LPL; LPLA2; GGTA1; and CMAH.

[0175] In certain embodiments, the host cells of the present disclosure exhibit reduced or eliminated expression of the following endogenous proteins: BAX; BAK; BCKDHA; MYC; LPL; LPLA2; GGTA1; and CMAH.

[0176] In certain embodiments, the host cells of the present disclosure exhibit reduced or eliminated expression of the following endogenous proteins: BAX; BAK; BCKDHA; MYC; PERK; LPL; LPLA2; GGTA1; and CMAH.

[0177] In certain embodiments, the host cells of the present disclosure exhibit reduced or eliminated expression of the following endogenous proteins: BAX; BAK; BCKDHA; LPL; LPLA2; GGTA1; CMAH; and PPT1.

[0178] In certain embodiments, the host cells of the present disclosure exhibit reduced or eliminated expression of the following endogenous proteins: BAX; BAK; BCKDHA; PERK; LPL; LPLA2; GGTA1; CMAH; and PPT1.

[0179] In certain embodiments, the host cells of the present disclosure exhibit reduced or eliminated expression of the following endogenous proteins: BAX; BAK; BCKDHA; MYC; LPL; LPLA2; GGTA1; CMAH; and PPT1.

[0180] In certain embodiments, the host cells of the present disclosure exhibit reduced or eliminated expression of the following endogenous proteins: BAX; BAK; BCKDHA; MYC; PERK; LPL; LPLA2; GGTA1; CMAH; and PPT1.

[0181] In certain embodiments, the host cells of the present disclosure exhibit reduced or eliminated expression of the following endogenous proteins: BAX; BAK; BCKDHB; MYC; PERK; LPL; LPLA2; GGTA1; CMAH; and PPT1.

[0182] In certain embodiments, the host cells of the present disclosure exhibit reduced or eliminated expression of the following endogenous proteins: BAX; BAK; BCKDHB; ICAM-1; GGTA1; CMAH; LPL; LPLA2; and PPT1.

[0183] In certain embodiments, the host cells of the present disclosure exhibit reduced or eliminated expression of the following endogenous proteins: BAX; BAK; BCKDHB; ICAM-1; SIRT-1; GGTA1; CMAH; LPL; LPLA2; and PPT1.

[0184] In certain embodiments, the host cells of the present disclosure exhibit reduced or eliminated expression of the following endogenous proteins: BAX; BAK; BCKDHB; ICAM-1; SIRT-1; MYC; GGTA1; CMAH; LPL; LPLA2; and PPT1.

[0185] In certain embodiments, the host cells of the present disclosure exhibit reduced or eliminated expression of the following endogenous proteins: BAX; BAK; BCKDHB; ICAM-1; SIRT-1; MYC; GGTA1; CMAH; LPL, LPLA2; PPT1; and LIPA.

[0186] In certain embodiments, the host cells of the present disclosure exhibit reduced or eliminated expression of the following endogenous proteins: BAX; BAK; BCKDHB; ICAM-1; GGTA1; CMAH; LPLA2; PPT1; and LIPA.

[0187] In certain embodiments, the host cells of the present disclosure exhibit reduced or eliminated expression of the following endogenous proteins: BAX; BAK; BCKDHB; ICAM-1; SIRT-1; GGTA1; CMAH; LPLA2; PPT1; and LIPA.

[0188] In certain embodiments, the host cells of the present disclosure exhibit reduced or eliminated expression of the following endogenous proteins: BAX; BAK; BCKDHB; ICAM-1; SIRT-1; MYC; GGTA1; CMAH; LPLA2; PPT1; and LIPA.

[0189] In certain embodiments, the host cells of the present disclosure exhibit reduced or eliminated expression of the following endogenous proteins: BAX; BAK; BCKDHB; ICAM-1; LPL; LPLA2; and PPT1.

[0190] In certain embodiments, the host cells of the present disclosure exhibit reduced or eliminated expression of the following endogenous proteins: BAX; BAK; BCKDHB; ICAM-1; SIRT-1; LPL, LPLA2; and PPT1.

[0191] In certain embodiments, the host cells of the present disclosure exhibit reduced or eliminated expression of the following endogenous proteins: BAX; BAK; BCKDHB; ICAM-1; SIRT-1; MYC; LPL; LPLA2; and PPT1.

[0192] In certain embodiments, the host cells of the present disclosure exhibit reduced or eliminated expression of the following endogenous proteins: BAX; BAK; BCKDHB; ICAM-1; SIRT-1; MYC; LPL; LPLA2; PPT1; and LIPA.

[0193] In certain embodiments, the host cells of the present disclosure exhibit reduced or eliminated expression of the following endogenous proteins: BAX; BAK; BCKDHB; ICAM-1; PERK; SIRT-1; and MYC.

[0194] In certain embodiments, the host cells of the present disclosure exhibit reduced or eliminated expression of the following endogenous proteins: MYC; BAX; BAK; BCKDHB; ICAM-1; PERK; SIRT-1; GGTA1; CMAH; LPL; LPLA2; PPT1 and LIPA.

[0195] In certain embodiments, the host cells of the present disclosure exhibit reduced or eliminated expression of the following endogenous proteins: BAX; BAK; BCKDHB; and PERK.

[0196] In certain embodiments, the host cells of the present disclosure exhibit reduced or eliminated expression of the following endogenous proteins: BAX; BAK; BCKDHB; MYC; SIRT-1; and ICAM.

[0197] In certain embodiments, the host cells of the present disclosure exhibit reduced or eliminated expression of the following endogenous proteins: BAX; BAK; BCKDHB; LPL; LPLA2; GGTA1; and CMAH.

[0198] In certain embodiments, the host cells of the present disclosure exhibit reduced or eliminated expression of the following endogenous proteins: BAX; BAK; BCKDHB; PERK; LPL; LPLA2; GGTA1; and CMAH.

[0199] In certain embodiments, the host cells of the present disclosure exhibit reduced or eliminated expression of the following endogenous proteins: BAX; BAK; BCKDHB; MYC; LPL; LPLA2; GGTA1; and CMAH.

[0200] In certain embodiments, the host cells of the present disclosure exhibit reduced or eliminated expression of the following endogenous proteins: BAX; BAK; BCKDHB; MYC; PERK; LPL; LPLA2; GGTA1; and CMAH.

[0201] In certain embodiments, the host cells of the present disclosure exhibit reduced or eliminated expression of the following endogenous proteins: BAX; BAK; BCKDHB; LPL; LPLA2; GGTA1; CMAH; and PPT1.

[0202] In certain embodiments, the host cells of the present disclosure exhibit reduced or eliminated expression of the following endogenous proteins: BAX; BAK; BCKDHB; PERK; LPL; LPLA2; GGTA1; CMAH; and PPT1.

[0203] In certain embodiments, the host cells of the present disclosure exhibit reduced or eliminated expression of the following endogenous proteins: BAX; BAK; BCKDHB; MYC; LPL; LPLA2; GGTA1; CMAH; and PPT1.

[0204] In certain embodiments, the host cells of the present disclosure exhibit reduced or eliminated expression of the following endogenous proteins: BAX; BAK; BCKDHB; MYC; PERK; LPL; LPLA2; GGTA1; CMAH; and PPT1.

[0205] In certain embodiments, the host cells of the present disclosure exhibit reduced or eliminated expression of the following endogenous proteins: BAX; BAK; BCKDHA; BCKDHB; MYC; PERK; LPL; LPLA2; GGTA1; CMAH; and PPT1.

[0206] In certain embodiments, the host cells of the present disclosure exhibit reduced or eliminated expression of the following endogenous proteins: BAX; BAK; BCKDHA; BCKDHB; ICAM-1; GGTA1; CMAH; LPL; LPLA2; and PPT1.

[0207] In certain embodiments, the host cells of the present disclosure exhibit reduced or eliminated expression of the following endogenous proteins: BAX; BAK; BCKDHA; BCKDHB; ICAM-1; SIRT-1; GGTA1; CMAH; LPL; LPLA2; and PPT1.

[0208] In certain embodiments, the host cells of the present disclosure exhibit reduced or eliminated expression of the following endogenous proteins: BAX; BAK; BCKDHA; BCKDHB; ICAM-1; SIRT-1; MYC; GGTA1; CMAH; LPL; LPLA2; and PPT1.

[0209] In certain embodiments, the host cells of the present disclosure exhibit reduced or eliminated expression of the following endogenous proteins: BAX; BAK; BCKDHA; BCKDHB; ICAM-1; SIRT-1; MYC; GGTA1; CMAH; LPL, LPLA2; PPT1; and LIPA.

[0210] In certain embodiments, the host cells of the present disclosure exhibit reduced or eliminated expression of the following endogenous proteins: BAX; BAK; BCKDHA; BCKDHB; ICAM-1; GGTA1; CMAH; LPLA2; PPT1; and LIPA.

[0211] In certain embodiments, the host cells of the present disclosure exhibit reduced or eliminated expression of the following endogenous proteins: BAX; BAK; BCKDHA; BCKDHB; ICAM-1; SIRT-1; GGTA1; CMAH; LPLA2; PPT1; and LIPA.

[0212] In certain embodiments, the host cells of the present disclosure exhibit reduced or eliminated expression of the following endogenous proteins: BAX; BAK; BCKDHA; BCKDHB; ICAM-1; SIRT-1; MYC; GGTA1; CMAH; LPLA2; PPT1; and LIPA.

[0213] In certain embodiments, the host cells of the present disclosure exhibit reduced or eliminated expression of the following endogenous proteins: BAX; BAK; BCKDHA; BCKDHB; ICAM-1; LPL; LPLA2; and PPT1.

[0214] In certain embodiments, the host cells of the present disclosure exhibit reduced or eliminated expression of the following endogenous proteins: BAX; BAK; BCKDHA; BCKDHB; ICAM-1; SIRT-1; LPL, LPLA2; and PPT1.

[0215] In certain embodiments, the host cells of the present disclosure exhibit reduced or eliminated expression of the following endogenous proteins: BAX; BAK; BCKDHA; BCKDHB; ICAM-1; SIRT-1; MYC; LPL; LPLA2; and PPT1.

[0216] In certain embodiments, the host cells of the present disclosure exhibit reduced or eliminated expression of the following endogenous proteins: BAX; BAK; BCKDHA; BCKDHB; ICAM-1; SIRT-1; MYC; LPL; LPLA2; PPT1; and LIPA.

[0217] In certain embodiments, the host cells of the present disclosure exhibit reduced or eliminated expression of the following endogenous proteins: BAX; BAK; BCKDHA; BCKDHB; ICAM-1; PERK; SIRT-1; and MYC.

[0218] In certain embodiments, the host cells of the present disclosure exhibit reduced or eliminated expression of the following endogenous proteins: MYC; BAX; BAK; BCKDHA; BCKDHB; ICAM-1; PERK; SIRT-1; GGTA1; CMAH; LPL; LPLA2; PPT1 and LIPA.

[0219] In certain embodiments, the host cells of the present disclosure exhibit reduced or eliminated expression of the following endogenous proteins: BAX; BAK; BCKDHA; BCKDHB; and PERK.

[0220] In certain embodiments, the host cells of the present disclosure exhibit reduced or eliminated expression of the following endogenous proteins: BAX; BAK; BCKDHA; BCKDHB; MYC; SIRT-1; and ICAM.

[0221] In certain embodiments, the host cells of the present disclosure exhibit reduced or eliminated expression of the following endogenous proteins: BAX; BAK; BCKDHA; BCKDHB; LPL; LPLA2; GGTA1; and CMAH.

[0222] In certain embodiments, the host cells of the present disclosure exhibit reduced or eliminated expression of the following endogenous proteins: BAX; BAK; BCKDHA; BCKDHB; PERK; LPL; LPLA2; GGTA1; and CMAH.

[0223] In certain embodiments, the host cells of the present disclosure exhibit reduced or eliminated expression of the following endogenous proteins: BAX; BAK; BCKDHA; BCKDHB; MYC; LPL; LPLA2; GGTA1; and CMAH.

[0224] In certain embodiments, the host cells of the present disclosure exhibit reduced or eliminated expression of the following endogenous proteins: BAX; BAK; BCKDHA; BCKDHB; MYC; PERK; LPL; LPLA2; GGTA1; and CMAH.

[0225] In certain embodiments, the host cells of the present disclosure exhibit reduced or eliminated expression of the following endogenous proteins: BAX; BAK; BCKDHA; BCKDHB; LPL; LPLA2; GGTA1; CMAH; and PPT1.

[0226] In certain embodiments, the host cells of the present disclosure exhibit reduced or eliminated expression of the following endogenous proteins: BAX; BAK; BCKDHA; BCKDHB; PERK; LPL; LPLA2; GGTA1; CMAH; and PPT1.

[0227] In certain embodiments, the host cells of the present disclosure exhibit reduced or eliminated expression of the following endogenous proteins: BAX; BAK; BCKDHA; BCKDHB; MYC; LPL; LPLA2; GGTA1; CMAH; and PPT1.

[0228] In certain embodiments, the host cells of the present disclosure exhibit reduced or eliminated expression of the following endogenous proteins. BAX; BAK; BCKDHA; BCKDHA; BCKDHB; MYC; PERK; LPL; LPLA2; GGTA1; CMAH; and PPT1.

[0229] In certain embodiments, a host cell of the present disclosure is modified to reduce or eliminate the expression of one or more host cell endogenous proteins relative to the expression of the host cell endogenous proteins in an unmodified, i.e., “reference”, host cell. In certain embodiments, the reference host cells are host cells where the expression of one or more particular endogenous product, e.g., a BAX; BAK; ICAM-1; SIRT-1; MYC; GGTA1; CMAH; LPL; LIPA; LPLA2; BCKDHA; BCKDHB; PPT1; and/or PERK polypeptide, is not reduced or eliminated. In certain embodiments, a reference host cell is a cell that comprises at least one or both wild-type alleles of the gene(s) coding for BAX; BAK; ICAM-1; SIRT-1; MYC; GGTA1; CMAH; LPL; LIPA; LPLA2; BCKDHA; BCKDHB; PPT1; and/or PERK. For example, but not by way of limitation, a reference host cell is a host cell that has both wild-type alleles of the gene(s) coding for BAX; BAK; ICAM-1; SIRT-1; MYC; GGTA1; CMAH; LPL; LIPA; LPLA2; BCKDHA; BCKDHB; PPT1; and/or PERK. In certain embodiments, the reference host cells are WT host cells. In certain embodiments, the modification of reducing or eliminating the expression of one or more host cell endogenous proteins is performed before the introduction of the exogenous nucleic acid encoding the recombinant protein of interest. In certain embodiments, the modification of reducing or eliminating the expression of one or more host cell endogenous proteins is performed after the introduction of the exogenous nucleic acid encoding the recombinant protein of interest.

[0230] In certain embodiments, the expression of one or more endogenous proteins, e.g., a BAX; BAK; ICAM-1; SIRT-1; MYC; GGTA1; CMAH; LPL; LPLA2; BCKDHA; BCKDHB; PPT1;
[0231] and/or PERK polypeptide, in a cell that has been modified to reduce or eliminate expression of the endogenous product, is less than about 90%, less than about 80%, less than about 70%, less than about 60%, less than about 50%, less than about 40%, less than about 30%, less than about 20%, less than about 10%, less than about 5%, less than about 4%, less than about 3%, less than about 2% or less than about 1% of the corresponding endogenous protein expression of a reference cell, e.g., a WT host cell. In certain embodiments, the expression of one or more endogenous proteins in a cell that has been modified to reduce or eliminate expression of the endogenous proteins, is less than about 90%, less than about 80%, less than about 70%, less than about 60%, less than about 50%, less than about 40%, less than about 30%, less than about 20%, less than about 10%, less than about 5%, less than about 4%, less than about 3%, less than about 2%, or less than about 1% of the corresponding endogenous protein expression of a reference cell, e.g., a WT host cell.

[0232] In certain embodiments, the expression of one or more endogenous proteins, e.g., a BAX; BAK; ICAM-1; SIRT-1; MYC; GGTA1; CMAH; LPL; LIPA; LPLA2; BCKDHA; BCKDHB; PPT1; and/or PERK polypeptide, in a host cell that has been modified to reduce or eliminate expression of the endogenous proteins, is at least about 90%, at least about 80%, at least about 70%, at least about 60%, at least about 50%, at least about 40%, at least about 30%, at least about 20%, at least about 10%, at least about 5%, at least about 4%, at least about 3%, at least about 2% or at least about 1% of the corresponding endogenous protein expression of a reference host cell, e.g., a WT host cell. In certain embodiments, the expression of one or more endogenous proteins in a host cell that has been modified to reduce or eliminate expression of the endogenous product, is at least about 90%, at least about 80%, at least about 70%, at least about 60%, at least about 50%, at least about 40%, at least about 30%, at least about 20%, at least about 10%, at least about 5%, at least about 4%, at least about 3%, at least about 2%, or at least about 1% of the corresponding endogenous protein expression of a reference cell, e.g., a WT CHO cell.

[0233] In certain embodiments, the expression of one or more particular endogenous proteins, e.g., a BAX; BAK; ICAM-1; SIRT-1; MYC; GGTA1; CMAH; LPL; LIPA; LPLA2; BCKDHA; BCKDHB; PPT1; and/or PERK polypeptide, in a cell that has been modified to reduce or eliminate expression of the endogenous proteins, is no more than about 90%, no more than about 80%, no more than about 70%, no more than about 60%, no more than about 50%, no more than about 40%, no more than about 30%, no more than about 20%, no more than about 10%, no more than about 5%, no more than about 4%, no more than about 3%, no more than about 2% or no more than about 1% of the corresponding endogenous protein expression of a reference host cell, e.g., a WT host cell. In certain embodiments, the expression of one or more endogenous proteins, e.g., a BAX; BAK; ICAM-1; SIRT-1; MYC; GGTA1; CMAH; LPL; LIPA; LPLA2; BCKDHA; BCKDHB; PPT1; and/or PERK polypeptide, in a cell that has been modified to reduce or eliminate expression of the endogenous proteins, is no more than about 40% of the corresponding endogenous protein expression of a reference cell, e.g., a WT CHO cell. In certain embodiments, the expression of one or more endogenous proteins in a cell that has been modified to reduce or eliminate expression of the endogenous proteins, is no more than about 90%, no more than about 80%, no more than about 70%, no more than about 60%, no more than about 50%, no more than about 40%, no more than about 30%, no more than about 20%, no more than about 10%, no more than about 5%, no more than about 4%, no more than about 3%, no more than about 2% or no more than about 1% of the corresponding endogenous protein expression of a reference cell, e.g., a WT host cell.

[0234] In certain embodiments, the expression of one or more endogenous proteins, e.g., a BAX; BAK; ICAM-1; SIRT-1; MYC; GGTA1; CMAH; LPL; LIPA; LPLA2; BCKDHA; BCKDHB; PPT1; and/or PERK polypeptide, in a cell that has been modified to reduce or eliminate expression of the endogenous proteins, is between about 1% and about 90%, between about 10% and about 90%, between about 20% and about 90%, between about 25% and about 90%, between about 30% and about 90%, between about 40% and about 90%, between about 50% and about 90%, between about 60% and about 90%, between about 70% and about 90%, between about 80% and about 90%, between about 85% and about 90%, between about 1% and about 80%, between about 10% and about 80%, between about 20% and about 80%, between about 30% and about 80%, between about 40% and about 80%, between about 50% and about 80%, between about 60% and about 80%, between about 70% and about 80%, between about 75% and about 80%, between about 1% and about 70%, between about 10% and about 70%, between about 20% and about 70%, between about 30% and about 70%, between about 40% and about 70%, between about 50% and about 70%, between about 60% and about 70%, between about 65% and about 70%, between about 1% and about 60%, between about 10% and about 60%, between about 20% and about 60%, between about 30% and about 60%, between about 40% and about 60%, between about 50% and about 60%, between about 55% and about 60%, between about 1% and about 50%, between about 10% and about 50%, between about 20% and about 50%, between about 30% and about 50%, between about 40% and about 50%, between about 45% and about 50%, between about 1% and about 40%, between about 10% and about 40%, between about 20% and about 40%, between about 30% and about 40%, between about 35% and about 40%, between about 1% and about 30%, between about 10% and about 30%, between about 20% and about 30%, between about 25% and about 30%, between about 1% and about 20%, between about 5% and about 20%, between about 10% and about 20%, between about 15% and about 20%, between about 1% and about 10%, between about 5% and about 10%, between about 5% and about 20%, between about 5% and about 30%, between about 5% and about 40% of the corresponding endogenous proteins expression of a reference cell, e.g., a WT host cell. In certain embodiments, the expression of one or more endogenous proteins, e.g., a BAX; BAK; ICAM-1; SIRT-1; MYC; GGTA1; CMAH; LPL; LIPA; LPLA2; BCKDHA; BCKDHB; PPT1; and/or PERK polypeptide, in a cell that has been modified to reduce or eliminate expression of the endogenous proteins, is between about 1% and about 90%, between about 10% and about 90%, between about 20% and about 90%, between about 25% and about 90%, between about 30% and about 90%, between about 40% and about 90%, between about 50% and about 90%, between about 60% and about 90%, between about 70% and about 90%, between about 80% and about 90%, between about 85% and about 90%, between about 1% and about 80%, between about 10% and about 80%, between about 20% and about 80%, between about 30% and about 80%, between about 40% and about 80%, between about 50% and about 80%, between about 60% and about 80%, between about 70% and about 80%, between about 75% and about 80%, between about 1% and about 70%, between about 10% and about 70%, between about 20% and about 70%, between about 30% and about 70%, between about 40% and about 70%, between about 50% and about 70%, between about 60% and about 70%, between about 65% and about 70%, between about 1% and about 60%, between about 10% and about 60%, between about 20% and about 60%, between about 30% and about 60%, between about 40% and about 60%, between about 50% and about 60%, between about 55% and about 60%, between about 1% and about 50%, between about 10% and about 50%, between about 20% and about 50%, between about 30% and about 50%, between about 40% and about 50%, between about 45% and about 50%, between about 1% and about 40%, between about 10% and about 40%, between about 20% and about 40%, between about 30% and about 40%, between about 35% and about 40%, between about 1% and about 30%, between about 10% and about 30%, between about 20% and about 30%, between about 25% and about 30%, between about 1% and about 20%, between about 5% and about 20%, between about 10% and about 20%, between about 15% and about 20%, between about 1% and about 10%, between about 5% and about 10%, between about 5% and about 20%, between about 5% and about 30%, between about 5% and about 40% of the corresponding endogenous protein expression of a reference cell, e.g., a WT host cell.

[0235] In certain embodiments, the expression of one or more endogenous proteins, e.g., a BAX; BAK; ICAM-1; SIRT-1; MYC; GGTA1; CMAH; LPL; LIPA; LPLA2; BCKDHA; BCKDHB; PPT1; and/or PERK polypeptide, in a cell that has been modified to reduce or eliminate expression of the endogenous proteins, is between about 5% and about 40% of the corresponding endogenous protein expression of a reference cell, e.g., a WT host cell.

[0236] In certain embodiments, the expression level of the one or more endogenous proteins, e.g., a BAX; BAK; ICAM-1; SIRT-1; MYC; GGTA1; CMAH; LPL; LIPA; LPLA2; BCKDHA; BCKDHB; PPT1; and/or PERK polypeptide, in different reference cells (e.g., cells that comprise at least one or both wild-type alleles of the corresponding gene) can vary.

[0237] In certain embodiments, a genetic engineering system is employed to reduce or eliminate the expression of one or more particular endogenous protein (e.g., a BAX; BAK; ICAM-1; SIRT-1; MYC; GGTA1; CMAH; LPL; LIPA; LPLA2; BCKDHA; BCKDHB; PPT1; and/or PERK expression). Various genetic engineering systems known in the art can be used for the methods disclosed herein. Non-limiting examples of such systems include the CRISPR/Cas system, the zinc-finger nuclease (ZFN) system, the transcription activator-like effector nuclease (TALEN) system and the use of other tools for reducing or eliminating protein expression by gene silencing, such as small interfering RNAs (siRNAs), short hairpin RNA (shRNA), and microRNA (miRNA).

[0238] Any CRISPR/Cas systems known in the art, including traditional, enhanced or modified Cas systems, as well as other bacterial based genome excising tools such as Cpf-1 can be used with the methods disclosed herein.

[0239] In certain embodiments, a portion of one or more genes, e.g., genes coding for a endogenous protein such as BAX; BAK; ICAM-1; SIRT-1; MYC; GGTA1; CMAH; LPL; LIPA; LPLA2; BCKDHA; BCKDHB; PPT1; and/or PERK polypeptides, is deleted to reduce or eliminate expression of the corresponding endogenous protein in a host cell. In certain embodiments, at least about 2%, at least about 5%, at least about 10%, at least about 15%, at least about 20%, at least about 25%, at least about 30%, at least about 35%, at least about 40%, at least about 45%, at least about 50%, at least about 55%, at least about 60%, at least about 65%, at least about 70%, at least about 75%, at least about 80%, at least about 85% or at least about 90% of the gene is deleted. In certain embodiments, no more than about 2%, no more than about 5%, no more than about 10%, no more than about 15%, no more than about 20%, no more than about 25%, no more than about 30%, no more than about 35%, no more than about 40%, no more than about 45%, no more than about 50%, no more than about 55%, no more than about 60%, no more than about 65%, no more than about 70%, no more than about 75%, no more than about 80%, no more than about 85% or no more than about 90% of the gene is deleted. In certain embodiments, between about 2% and about 90%, between about 10% and about 90%, between about 20% and about 90%, between about 25% and about 90%, between about 30% and about 90%, between about 40% and about 90%, between about 50% and about 90%, between about 60% and about 90%, between about 70% and about 90%, between about 80% and about 90%, between about 85% and about 90%, between about 2% and about 80%, between about 10% and about 80%, between about 20% and about 80%, between about 30% and about 80%, between about 40% and about 80%, between about 50% and about 80%, between about 60% and about 80%, between about 70% and about 80%, between about 75% and about 80%, between about 2% and about 70%, between about 10% and about 70%, between about 20% and about 70%, between about 30% and about 70%, between about 40% and about 70%, between about 50% and about 70%, between about 60% and about 70%, between about 65% and about 70%, between about 2% and about 60%, between about 10% and about 60%, between about 20% and about 60%, between about 30% and about 60%, between about 40% and about 60%, between about 50% and about 60%, between about 55% and about 60%, between about 2% and about 50%, between about 10% and about 50%, between about 20% and about 50%, between about 30% and about 50%, between about 40% and about 50%, between about 45% and about 50%, between about 2% and about 40%, between about 10% and about 40%, between about 20% and about 40%, between about 30% and about 40%, between about 35% and about 40%, between about 2% and about 30%, between about 10% and about 30%, between about 20% and about 30%, between about 25% and about 30%, between about 2% and about 20%, between about 5% and about 20%, between about 10% and about 20%, between about 15% and about 20%, between about 2% and about 10%, between about 5% and about 10%, or between about 2% and about 5% of the gene is deleted.

[0240] In certain embodiments, at least one exon of a gene encoding a BAX; BAK; ICAM-1; SIRT-1; MYC; GGTA1; CMAH; LPL; LIPA; LPLA2; BCKDHA; BCKDHB; PPT1; and/or PERK polypeptide is at least partially deleted in a host cell. “Partially deleted,” as used herein, refers to at least about 2%, at least about 5%, at least about 10%, at least about 15%, at least about 20%, at least about 25%, at least about 30%, at least about 35%, at least about 40%, at least about 45%, at least about 50%, at least about 55%, at least about 60%, at least about 65%, at least about 70%, at least about 75%, at least about 80%, at least about 85%, at least about 90%, at least about 95%, no more than about 2%, no more than about 5%, no more than about 10%, no more than about 15%, no more than about 20%, no more than about 25%, no more than about 30%, no more than about 35%, no more than about 40%, no more than about 45%, no more than about 50%, no more than about 55%, no more than about 60%, no more than about 65%, no more than about 70%, no more than about 75%, no more than about 80%, no more than about 85%, no more than about 90%, no more than about 95%, between about 2% and about 90%, between about 10% and about 90%, between about 20% and about 90%, between about 25% and about 90%, between about 30% and about 90%, between about 40% and about 90%, between about 50% and about 90%, between about 60% and about 90%, between about 70% and about 90%, between about 80% and about 90%, between about 85% and about 90%, between about 2% and about 80%, between about 10% and about 80%, between about 20% and about 80%, between about 30% and about 80%, between about 40% and about 80%, between about 50% and about 80%, between about 60% and about 80%, between about 70% and about 80%, between about 75% and about 80%, between about 2% and about 70%, between about 10% and about 70%, between about 20% and about 70%, between about 30% and about 70%, between about 40% and about 70%, between about 50% and about 70%, between about 60% and about 70%, between about 65% and about 70%, between about 2% and about 60%, between about 10% and about 60%, between about 20% and about 60%, between about 30% and about 60%, between about 40% and about 60%, between about 50% and about 60%, between about 55% and about 60%, between about 2% and about 50%, between about 10% and about 50%, between about 20% and about 50%, between about 30% and about 50%, between about 40% and about 50%, between about 45% and about 50%, between about 2% and about 40%, between about 10% and about 40%, between about 20% and about 40%, between about 30% and about 40%, between about 35% and about 40%, between about 2% and about 30%, between about 10% and about 30%, between about 20% and about 30%, between about 25% and about 30%, between about 2% and about 20%, between about 5% and about 20%, between about 10% and about 20%, between about 15% and about 20%, between about 2% and about 10%, between about 5% and about 10%, or between about 2% and about 5% of a region, e.g., of the exon, is deleted.

[0241] In certain non-limiting embodiments, a CRISPR/Cas9 system is employed to reduce or eliminate the expression of one or more endogenous proteins, e.g., a BAX; BAK; ICAM-1; SIRT-1; MYC; GGTA1; CMAH; LPL; LIPA; LPLA2; BCKDHA; BCKDHB; PPT1; and/or PERK polypeptide in a host cell. A clustered regularly-interspaced short palindromic repeats (CRISPR) system is a genome editing tool discovered in prokaryotic cells. When utilized for genome editing, the system includes Cas9 (a protein able to modify DNA utilizing crRNA as its guide), CRISPR RNA (crRNA, contains the RNA used by Cas9 to guide it to the correct section of host DNA along with a region that binds to tracrRNA (generally in a hairpin loop form) forming an active complex with Cas9), and trans-activating crRNA (tracrRNA, binds to crRNA and forms an active complex with Cas9). The terms “guide RNA” and “gRNA” refer to any nucleic acid that promotes the specific association (or “targeting”) of an RNA-guided nuclease such as a Cas9 to a target sequence such as a genomic or episomal sequence in a cell. gRNAs can be unimolecular (comprising a single RNA molecule, and referred to alternatively as chimeric) or modular (comprising more than one, and typically two, separate RNA molecules, such as a crRNA and a tracrRNA, which are usually associated with one another, for instance by duplexing).

[0242] CRISPR/Cas9 strategies can employ a vector to transfect the CHO cell. The guide RNA (gRNA) can be designed for each application as this is the sequence that Cas9 uses to identify and directly bind to the target DNA in a CHO cell. Multiple crRNAs and the tracrRNA can be packaged together to form a single-guide RNA (sgRNA). The sgRNA can be joined together with the Cas9 gene and made into a vector in order to be transfected into CHO cells.

[0243] In certain embodiments, the CRISPR/Cas9 system for use in reducing or eliminating the expression of one or more endogenous proteins, e.g., a BAX; BAK; ICAM-1; SIRT-1; MYC; GGTA1; CMAH; LPL; LIPA; LPLA2; BCKDHA; BCKDHB; PPT1; and/or PERK polypeptide, comprises a Cas9 molecule and one or more gRNAs comprising a targeting domain that is complementary to a target sequence of the gene encoding the endogenous protein or a component thereof. In certain embodiments, the target gene is a region of the gene coding for the endogenous product, e.g., a BAX; BAK; ICAM-1; SIRT-1; MYC; GGTA1; CMAH; LPL; LIPA; LPLA2; BCKDHA; BCKDHB; PPT1; and/or PERK polypeptide. The target sequence can be any exon or intron region within the gene.

[0244] In certain embodiments, the gRNAs are administered to the CHO cell in a single vector and the Cas9 molecule is administered to the host cell in a second vector. In certain embodiments, the gRNAs and the Cas9 molecule are administered to the host cell in a single vector. Alternatively, each of the gRNAs and Cas9 molecule can be administered by separate vectors. In certain embodiments, the CRISPR/Cas9 system can be delivered to the host cell as a ribonucleoprotein complex (RNP) that comprises a Cas9 protein complexed with one or more gRNAs, e.g., delivered by electroporation (see, e.g., DeWitt et al., Methods 121-122:9-15 (2017) for additional methods of delivering RNPs to a cell). In certain embodiments, administering the CRISPR/Cas9 system to the host cell results in the reduction or elimination of the expression of an endogenous product, e.g., a BAX; BAK; ICAM-1; SIRT-1; MYC; GGTA1; CMAH; LPL; LIPA; LPLA2; BCKDHA; BCKDHB; PPT1; and/or PERK polypeptide.

[0245] Using CRISPR/Cas9, a particular target gene can be targeted at one, two, three or more different sites. For example, but not by way of limitation, three different sites within the coding sequence can be targeted using three different gRNAs at the same time using multiplexed ribonucleoprotein delivery. In certain embodiments, multiplexed ribonucleoprotein delivery shows higher gene-editing efficacy and specificity compared to the common plasmid based CRISPR/Cas9 editing. In certain embodiments, double-strand breaks at the gene target site(s) induce indel formations. In certain embodiments, e.g., when multiple sites are targeted due to multiplexed gRNA usage, deletions of sequences between the target sites, e.g., intervening exons, result a frameshift of the CDS of the target protein.

[0246] In certain embodiments, sequencing of the PCR-amplified gene locus in the modified cell pools will reveal an interruption of the sequencing reaction at the first gRNA site showing successful targeting for the gene. In certain embodiments the cell pools will comprise modification(s) at all targeted genes in at least about 2%, at least about 5%, at least about 10%, at least about 15%, at least about 20%, at least about 25%, at least about 30%, at least about 35%, at least about 40%, at least about 45%, at least about 50%, at least about 55%, at least about 60%, at least about 65%, at least about 70%, at least about 75%, at least about 80%, at least about 85%, at least about 90%, or at least about 95% of the cells in the pool. In certain embodiments the cell pools will comprise modification(s) at “n−1” of the “n” targeted genes (where “n” is the number of targeted genes) in at least about 2%, at least about 5%, at least about 10%, at least about 15%, at least about 20%, at least about 25%, at least about 30%, at least about 35%, at least about 40%, at least about 45%, at least about 50%, at least about 55%, at least about 60%, at least about 65%, at least about 70%, at least about 75%, at least about 80%, at least about 85%, at least about 90%, or at least about 95% of the cells in the pool. In certain embodiments the cell pools will comprise modification(s) at “n−2” of the “n” targeted genes in at least about 2%, at least about 5%, at least about 10%, at least about 15%, at least about 20%, at least about 25%, at least about 30%, at least about 35%, at least about 40%, at least about 45%, at least about 50%, at least about 55%, at least about 60%, at least about 65%, at least about 70%, at least about 75%, at least about 80%, at least about 85%, at least about 90%, or at least about 95% of the cells in the pool. In certain embodiments the cell pools will comprise modification(s) at “n−3” of the “n” targeted genes in at least about 2%, at least about 5%, at least about 10%, at least about 15%, at least about 20%, at least about 25%, at least about 30%, at least about 35%, at least about 40%, at least about 45%, at least about 50%, at least about 55%, at least about 60%, at least about 65%, at least about 70%, at least about 75%, at least about 80%, at least about 85%, at least about 90%, or at least about 95% of the cells in the pool. In certain embodiments the cell pools will comprise modification(s) at “n−4” of the “n” targeted genes in at least about 2%, at least about 5%, at least about 10%, at least about 15%, at least about 20%, at least about 25%, at least about 30%, at least about 35%, at least about 40%, at least about 45%, at least about 50%, at least about 55%, at least about 60%, at least about 65%, at least about 70%, at least about 75%, at least about 80%, at least about 85%, at least about 90%, or at least about 95% of the cells in the pool. In certain embodiments the cell pools will comprise modification(s) at one to “n” of the “n” targeted genes in at least about 2%, at least about 5%, at least about 10%, at least about 15%, at least about 20%, at least about 25%, at least about 30%, at least about 35%, at least about 40%, at least about 45%, at least about 50%, at least about 55%, at least about 60%, at least about 65%, at least about 70%, at least about 75%, at least about 80%, at least about 85%, at least about 90%, or at least about 95% of the cells in the pool.

[0247] In certain embodiments, the genetic engineering system is a ZFN system for reducing or eliminating the expression of one or more particular endogenous protein in a CHO cell, e.g., a BAX; BAK; ICAM-1; SIRT-1; MYC; GGTA1; CMAH; LPL; LIPA; LPLA2; BCKDHA; BCKDHB; PPT1; and/or PERK polypeptide. The ZFN can act as restriction enzyme, which is generated by combining a zinc finger DNA-binding domain with a DNA-cleavage domain. A zinc finger domain can be engineered to target specific DNA sequences which allows the zinc-finger nuclease to target desired sequences within genomes. The DNA-binding domains of individual ZFNs typically contain a plurality of individual zinc finger repeats and can each recognize a plurality of base pairs. The most common method to generate a new zinc-finger domain is to combine smaller zinc-finger “modules” of known specificity. The most common cleavage domain in ZFNs is the non-specific cleavage domain from the type IIs restriction endonuclease FokI. ZFN modulates the expression of proteins by producing double-strand breaks (DSBs) in the target DNA sequence, which will, in the absence of a homologous template, be repaired by non-homologous end-joining (NHEJ). Such repair can result in deletion or insertion of base-pairs, producing frameshift and preventing the production of the harmful protein (Durai et al., Nucleic Acids Res.; 33 (18): 5978-90 (2005)). Multiple pairs of ZFNs can also be used to completely remove entire large segments of genomic sequence (Lee et al., Genome Res.; 20 (1): 81-9 (2010)).

[0248] In certain embodiments, the genetic engineering system is a TALEN system for reducing or eliminating the expression of one or more particular endogenous product, e.g., a BAX; BAK; ICAM-1; SIRT-1; MYC; GGTA1; CMAH; LPL; LIPA; LPLA2; BCKDHA; BCKDHB; PPT1; and/or PERK polypeptide, in a CHO cell. TALENs are restriction enzymes that can be engineered to cut specific sequences of DNA. TALEN systems operate on a similar principle as ZFNs. TALENs are generated by combining a transcription activator-like effectors DNA-binding domain with a DNA cleavage domain. Transcription activator-like effectors (TALEs) are composed of 33-34 amino acid repeating motifs with two variable positions that have a strong recognition for specific nucleotides. By assembling arrays of these TALEs, the TALE DNA-binding domain can be engineered to bind desired DNA sequence, and thereby guide the nuclease to cut at specific locations in genome (Boch et al., Nature Biotechnology; 29(2):135-6 (2011)). In certain embodiments, the target gene encodes a BAX; BAK; ICAM-1; SIRT-1; MYC; GGTA1; CMAH; LPL; LIPA; LPLA2; BCKDHA; BCKDHB; PPT1; and/or PERK.

[0249] In certain embodiments, the expression of one or more particular endogenous product, e.g., a BAX; BAK; ICAM-1; SIRT-1; MYC; GGTA1; CMAH; LPL; LIPA; LPLA2; BCKDHA; BCKDHB; PPT1; and/or PERK polypeptide, can be reduced or eliminated using oligonucleotides that have complementary sequences to corresponding nucleic acids (e.g., mRNA). Non-limiting examples of such oligonucleotides include small interference RNA (siRNA), short hairpin RNA (shRNA), and microRNA (miRNA). In certain embodiments, such oligonucleotides can be homologous to at least a portion of a BAX; BAK; ICAM-1; SIRT-1; MYC; GGTA1; CMAH; LPL; LIPA; LPLA2; BCKDHA; BCKDHB; PPT1; and/or PERK nucleic acid sequence, wherein the homology of the portion relative to the corresponding nucleic acid sequence is at least about 75 or at least about 80 or at least about 85 or at least about 90 or at least about 95 or at least about 98 percent. In certain non-limiting embodiments, the complementary portion can constitute at least 10 nucleotides or at least 15 nucleotides or at least 20 nucleotides or at least 25 nucleotides or at least 30 nucleotides and the antisense nucleic acid, shRNA, mRNA or siRNA molecules can be up to 15 or up to 20 or up to 25 or up to 30 or up to 35 or up to 40 or up to 45 or up to 50 or up to 75 or up to 100 nucleotides in length. Antisense nucleic acid, shRNA, mRNA or siRNA molecules can comprise DNA or atypical or non-naturally occurring residues, for example, but not limited to, phosphorothioate residues.

[0250] The genetic engineering systems disclosed herein can be delivered into the CHO cell using a viral vector, e.g., retroviral vectors such as gammaretroviral vectors, and lentiviral vectors. Combinations of retroviral vector and an appropriate packaging line are suitable, where the capsid proteins will be functional for infecting human cells. Various amphotropic virus-producing cell lines are known, including, but not limited to, PA12 (Miller, et al. (1985) Mol. Cell. Biol. 5:431-437); PA317 (Miller, et al. (1986) Mol. Cell. Biol. 6:2895-2902); and CRIP (Danos, et al. (1988) Proc. Natl. Acad. Sci. USA 85:6460-6464). Non-amphotropic particles are suitable too, e.g., particles pseudotyped with VSVG, RD 114 or GALV envelope and any other known in the art. Possible methods of transduction also include direct co-culture of the cells with producer cells, e.g., by the method of Bregni, et al. (1992) Blood 80:1418-1422, or culturing with viral supernatant alone or concentrated vector stocks with or without appropriate growth factors and polycations, e.g., by the method of Xu, et al. (1994) Exp. Hemat. 22:223-230; and Hughes, et al. (1992) J. Clin. Invest. 89:1817.

[0251] Other transducing viral vectors can be used to modify the CHO cells disclosed herein. In certain embodiments, the chosen vector exhibits high efficiency of infection and stable integration and expression (see, e.g., Cayouette et al., Human Gene Therapy 8:423-430, 1997; Kido et al., Current Eye Research 15:833-844, 1996; Bloomer et al., Journal of Virology 71:6641-6649, 1997; Naldini et al., Science 272:263-267, 1996; and Miyoshi et al., Proc. Natl. Acad. Sci. U.S.A. 94:10319, 1997). Other viral vectors that can be used include, for example, adenoviral, lentiviral, and adena-associated viral vectors, vaccinia virus, a bovine papilloma virus, or a herpes virus, such as Epstein-Barr Virus (also see, for example, the vectors of Miller, Human Gene Therapy 15-14, 1990; Friedman, Science 244:1275-1281, 1989; Eglitis et al., BioTechniques 6:608-614, 1988; Tolstoshev et al., Current Opinion in Biotechnology 1:55-61, 1990; Sharp, The Lancet 337:1277-1278, 1991; Cornetta et al., Nucleic Acid Research and Molecular Biology 36:311-322, 1987; Anderson, Science 226:401-409, 1984; Moen, Blood Cells 17:407-416, 1991; Miller et al., Biotechnology 7:980-990, 1989; LeGal La Salle et al., Science 259:988-990, 1993; and Johnson, Chest 107:77S-83S, 1995). Retroviral vectors are particularly well developed and have been used in clinical settings (Rosenberg et al., N. Engl. J. Med 323:370, 1990; Anderson et al., U.S. Pat. No. 5,399,346).

[0252] Non-viral approaches can also be employed for genetic engineering of the CHO cell disclosed herein. For example, a nucleic acid molecule can be introduced into the CHO cell by administering the nucleic acid in the presence of lipofection (Feigner et al., Proc. Natl. Acad. Sci. U.S.A. 84:7413, 1987; Ono et al., Neuroscience Letters 17:259, 1990; Brigham et al., Am. J. Med. Sci. 298:278, 1989; Staubinger et al., Methods in Enzymology 101:512, 1983), asialoorosomucoid-polylysine conjugation (Wu et al., Journal of Biological Chemistry 263:14621, 1988; Wu et al., Journal of Biological Chemistry 264:16985, 1989), or by micro-injection under surgical conditions (Wolff et al., Science 247:1465, 1990). Other non-viral means for gene transfer include transfection in vitro using calcium phosphate, DEAE dextran, electroporation and protoplast fusion. Liposomes can also be potentially beneficial for delivery of nucleic acid molecules into a CHO cell. Transplantation of normal genes into the affected tissues of a subject can also be accomplished by transferring a normal nucleic acid into a cultivatable cell type ex vivo (e.g., an autologous or heterologous primary cell or progeny thereof), after which the cell (or its descendants) is injected into a targeted tissue or are injected systemically.

### 4. Integration of Exogenous Nucleic Acids

[0253] An exogenous nucleotide sequence, as used herein, is a nucleotide sequence that does not originate from a host cell but can be introduced into a host cell by traditional DNA delivery methods, e.g., by transfection, electroporation, or transformation methods. In certain embodiments, the exogenous nucleotide sequence is a sequence of interest (SOI), e.g., a nucleotide sequence encoding a polypeptide of interest. In certain embodiments, however, the exogenous nucleotide sequences employed in the context of the instant disclosure comprises elements, e.g., one or more recombination recognition sequences (RRs) and one or more selection markers, which facilitate the introduction of additional nucleic acid sequences, e.g., SOIs. In certain embodiments, the exogenous nucleotide sequences facilitating the introduction of additional nucleic acid sequences are referred to herein as “landing pads.” Accordingly, in certain embodiments, a TI host cell can comprise: (1) an exogenous nucleotide sequence that includes one or more SOIs, e.g., an SOI incorporated into a particular locus in a host cell genome via an exogenous site-specific nuclease mediated (e.g., CRISPR/Cas9-mediated) targeted integration; (2) an exogenous nucleotide sequence that includes one or more landing pads; or (3) an exogenous nucleotide sequence that includes one or more landing pads into which one or more SOIs have been incorporated.

[0254] In certain embodiments, a TI host cell comprises at least one exogenous nucleotide sequence integrated at one or more integration sites in the genome of the TI host cell. In certain embodiments, the exogenous nucleotide sequence is integrated at one or more integration sites within a specific a locus of the genome of the TI host cell.

### 4.1 Landing Pads

[0255] In certain embodiments, an integrated exogenous nucleotide sequence comprises one or more recombination recognition sequence (RRS), wherein the RRS can be recognized by a recombinase. In certain embodiments, the integrated exogenous nucleotide sequence comprises at least two RRSs. In certain embodiments, the integrated exogenous nucleotide sequence comprises two RRSs and the two RRSs are the same. In certain embodiments, the integrated exogenous nucleotide sequence comprises two RRSs and the two RRSs are heterospecific, i.e., not recognized by the same recombinase. In certain embodiments, an integrated exogenous nucleotide sequence comprises three RRSs, wherein the third RRS is located between the first and the second RRS. In certain embodiments, the first and the second RRS are the same and the third RRS is different from the first or the second RRS. In certain embodiments, all three RRSs are heterospecific. In certain embodiments, an integrated exogenous nucleotide sequence comprises four, five, six, seven, or eight RRSs. In certain embodiments, an integrated exogenous nucleotide sequence comprises multiple RRSs. In certain embodiments, the multiple two or more RRSs are the same. In certain embodiments, the two or more RRSs are heterospecific. In certain embodiments each RRS can be recognized by a distinct recombinase. In certain embodiments, the subset of the total number of RRSs are the homospecific, i.e., recognized by the same recombinase, and a subset of the total number of RRSs are heterospecific, i.e., not recognized by the same recombinase. In certain embodiments, the RRS or RRSs can be selected from the group consisting of a LoxP sequence, a LoxP L3 sequence, a LoxP 2L sequence, a LoxFas sequence, a Lox511 sequence, a Lox2272 sequence, a Lox2372 sequence, a Lox5171 sequence, a Loxm2 sequence, a Lox71 sequence, a Lox66 sequence, a FRT sequence, a Bxb1 attP sequence, a Bxb1 attB sequence, a φC31 attP sequence, and a φC31 attB sequence.

[0256] In certain embodiments, the integrated exogenous nucleotide sequence comprises at least one selection marker. In certain embodiments, the integrated exogenous nucleotide sequence comprises one RRS and at least one selection marker. In certain embodiments, the integrated exogenous nucleotide sequence comprises a first and a second RRS, and at least one selection marker. In certain embodiments, a selection marker is located between the first and the second RRS. In certain embodiments, two RRSs flank at least one selection marker, i.e., a first RRS is located 5′ upstream and a second RRS is located 3′ downstream of the selection marker. In certain embodiments, a first RRS is adjacent to the 5′ end of the selection marker and a second RRS is adjacent to the 3′ end of the selection marker.

[0257] In certain embodiments, a selection marker is located between a first and a second RRS and the two flanking RRSs are the same. In certain embodiments, the two RRSs flanking the selection marker are both LoxP sequences. In certain embodiments, the two RRSs flanking the selection marker are both FRT sequences. In certain embodiments, a selection marker is located between a first and a second RRS and the two flanking RRSs are heterospecific. In certain embodiments, the first flanking RRS is a LoxP L3 sequence and the second flanking RRS is a LoxP 2L sequence. In certain embodiments, a LoxP L3 sequenced is located 5′ of the selection marker and a LoxP 2L sequence is located 3′ of the selection marker. In certain embodiments, the first flanking RRS is a wild-type FRT sequence and the second flanking RRS is a mutant FRT sequence. In certain embodiments, the first flanking RRS is a Bxb1 attP sequence and the second flanking RRS is a Bxb1 attB sequence. In certain embodiments, the first flanking RRS is a φC31 attP sequence and the second flanking RRS is a φC31 attB sequence. In certain embodiments, the two RRSs are positioned in the same orientation. In certain embodiments, the two RRSs are both in the forward or reverse orientation. In certain embodiments, the two RRSs are positioned in opposite orientation.

[0258] In certain embodiments, a selection marker can be an aminoglycoside phosphotransferase (APH) (e.g., hygromycin phosphotransferase (HYG), neomycin and G418 APH), dihydrofolate reductase (DHFR), thymidine kinase (TK), glutamine synthetase (GS), asparagine synthetase, tryptophan synthetase (indole), histidinol dehydrogenase (histidinol D), and genes encoding resistance to puromycin, blasticidin, bleomycin, phleomycin, chloramphenicol, Zeocin, or mycophenolic acid. In certain embodiments, a selection marker can be a GFP, an eGFP, a synthetic GFP, a YFP, an eYFP, a CFP, an mPlum, an mCherry, a tdTomato, an mStrawberry, a J-red, a DsRed-monomer, an mOrange, an mKO, an mCitrine, a Venus, a YPet, an Emerald, a CyPet, an mCFPm, a Cerulean, or a T-Sapphire marker. In certain embodiments, the selection marker can be a fusion construct comprising at least two selection markers. In certain embodiments the gene encoding a selection marker or a fragment of the selection marker can be fused to the gene encoding a different selection marker or a fragment thereof.

[0259] In certain embodiments, the integrated exogenous nucleotide sequence comprises two selection markers flanked by two RRSs, wherein a first selection marker is different from a second selection marker. In certain embodiments, the two selection markers are both selected from the group consisting of a glutamine synthetase selection marker, a thymidine kinase selection marker, a HYG selection marker, and a puromycin resistance selection marker. In certain embodiments, the integrated exogenous nucleotide sequence comprises a thymidine kinase selection marker and a HYG selection marker. In certain embodiments, the first selection maker is selected from the group consisting of an aminoglycoside phosphotransferase (APH) (e.g., hygromycin phosphotransferase (HYG), neomycin and G418 APH), dihydrofolate reductase (DHFR), thymidine kinase (TK), glutamine synthetase (GS), asparagine synthetase, tryptophan synthetase (indole), histidinol dehydrogenase (histidinol D), and genes encoding resistance to puromycin, blasticidin, bleomycin, phleomycin, chloramphenicol, Zeocin, and mycophenolic acid, and the second selection maker is selected from the group consisting of a GFP, an eGFP, a synthetic GFP, a YFP, an eYFP, a CFP, an mPlum, an mCherry, a tdTomato, an mStrawberry, a J-red, a DsRed-monomer, an mOrange, an mKO, an mCitrine, a Venus, a YPet, an Emerald, a CyPet, an mCFPm, a Cerulean, and a T-Sapphire marker. In certain embodiments, the first selection marker is a glutamine synthetase selection marker and the second selection marker is a GFP marker. In certain embodiments, the two RRSs flanking both selection markers are the same. In certain embodiments, the two RRSs flanking both selection markers are different.

[0260] In certain embodiments, the selection marker is operably linked to a promoter sequence. In certain embodiments, the selection marker is operably linked to an SV40 promoter. In certain embodiments, the selection marker is operably linked to a Cytomegalovirus (CMV) promoter.

[0261] In certain embodiments, the integrated exogenous nucleotide sequence comprises at least one selection marker and an IRES, wherein the IRES is operably linked to the selection marker. In certain embodiments, the selection marker operably linked to the IRES is selected from the group consisting of a GFP, an eGFP, a synthetic GFP, a YFP, an eYFP, a CFP, an mPlum, an mCherry, a tdTomato, an mStrawberry, a J-red, a DsRed-monomer, an mOrange, an mKO, an mCitrine, a Venus, a YPet, an Emerald, a CyPet, an mCFPm, a Cerulean, and a T-Sapphire marker. In certain embodiments, the selection marker operably linked to the IRES is a GFP marker. In certain embodiments, the integrated exogenous nucleotide sequence comprises an IRES and two selection markers flanked by two RRSs, wherein the IRES is operably linked to the second selection marker.

[0262] In certain embodiments, the integrated exogenous nucleotide sequence comprises an IRES and three selection markers flanked by two RRSs, wherein the IRES is operably linked to the third selection marker. In certain embodiments, the integrated exogenous nucleotide sequence comprises an IRES and three selection markers flanked by two RRSs, wherein the IRES is operably linked to the third selection marker. In certain embodiments, the third selection marker is different from the first or the second selection marker. In certain embodiments, the integrated exogenous nucleotide sequence comprises a first selection marker operably linked to a promoter and a second selection marker operably linked to an IRES. In certain embodiments, the integrated exogenous nucleotide sequence comprises a glutamine synthetase selection marker operably linked to a SV40 promoter and a GFP selection marker operably linked to an IRES. In certain embodiments, the integrated exogenous nucleotide sequence comprises a thymidine kinase selection marker and a HYG selection marker operably linked to a CMV promoter and a GFP selection marker operably linked to an IRES.

[0263] In certain embodiments, the integrated exogenous nucleotide sequence comprises three RRSs. In certain embodiments, the third RRS is located between the first and the second RRS. In certain embodiments, all three RRSs are the same. In certain embodiments, the first and the second RRS are the same, and the third RRS is different from the first or the second RRS. In certain embodiments, all three RRSs are heterospecific.

### 4.2 Sequences of Interest (SOIs)

[0264] In certain embodiments, the integrated exogenous nucleotide sequence comprises at least one exogenous SOI. In certain embodiments, the integrated exogenous nucleotide sequence comprises at least one selection marker and at least one exogenous SOI. In certain embodiments, the integrated exogenous nucleotide sequence comprises at least one selection marker, at least one exogenous SOI, and at least one RRS. In certain embodiments, the integrated exogenous nucleotide sequence comprises at least one, at least two, at least three, at least four, at least five, at least six, at least seven, at least eight or more SOIs. In certain embodiments the SOIs are the same. In certain embodiments, the SOIs are different.

[0265] In certain embodiments the SOI encodes a single chain antibody or fragment thereof. In certain embodiments, the SOI encodes an antibody heavy chain sequence or fragment thereof. In certain embodiments, the SOI encodes an antibody light chain sequence or fragment thereof. In certain embodiments, an integrated exogenous nucleotide sequence comprises an SOI encoding an antibody heavy chain sequence or fragment thereof and an SOI encoding an antibody light chain sequence or fragment thereof. In certain embodiments, an integrated exogenous nucleotide sequence comprises an SOI encoding a first antibody heavy chain sequence or fragment thereof, an SOI encoding a second antibody heavy chain sequence or fragment thereof, and an SOI encoding an antibody light chain sequence or fragment thereof. In certain embodiments, an integrated exogenous nucleotide sequence comprises an SOI encoding a first antibody heavy chain sequence or fragment thereof, an SOI encoding a second antibody heavy chain sequence or fragment thereof, an SOI encoding a first antibody light chain sequence or fragment thereof and a second SOI encoding an antibody light chain sequence or fragment thereof. In certain embodiments, the number of SOIs encoding for heavy and light chain sequences can be selected to achieve a desired expression level of the heavy and light chain polypeptides, e.g., to achieve a desired amount of bispecific antibody production. In certain embodiments, the individual SOIs encoding heavy and light chain sequences can be integrated, e.g., into a single exogenous nucleic acid sequence present at a single integration site, into multiple exogenous nucleic acid sequences present at a single integration site, or into multiple exogenous nucleic acid sequences integrated at distinct integration sites within the TI host cell.

[0266] In certain embodiments, the integrated exogenous nucleotide sequence comprises at least one selection marker, at least one exogenous SOI, and one RRS. In certain embodiments, the RRS is located adjacent to at least one selection marker or at least one exogenous SOI. In certain embodiments, the integrated exogenous nucleotide sequence comprises at least one selection marker, at least one exogenous SOI, and two RRSs. In certain embodiments, the integrated exogenous nucleotide sequence comprises at least one selection marker and at least one exogenous SOI located between the first and the second RRS. In certain embodiments, the two RRSs flanking the selection marker and the exogenous SOI are the same. In certain embodiments, the two RRSs flanking the selection marker and the exogenous SOI are different. In certain embodiments, the first flanking RRS is a LoxP L3 sequence and the second flanking RRS is a LoxP 2L sequence. In certain embodiments, a L3 LoxP sequenced is located 5′ of the selection marker and the exogenous SOI, and a LoxP 2L sequence is located 3′ of the selection marker and the exogenous SOI.

[0267] In certain embodiments, the integrated exogenous nucleotide sequence comprises three RRSs and two exogenous SOIs, and the third RRS is located between the first and the second RRS. In certain embodiments, the first SOI is located between the first and the third RRS, and the second SOI is located between the third and the second RRS. In certain embodiments, the first and the second SOI are different. In certain embodiments, the first and the second RRS are the same and the third RRS is different from the first or the second RRS. In certain embodiments, all three RRSs are heterospecific. In certain embodiments, the first RRS is a LoxP L3 site, the second RRS is a LoxP 2L site, and the third RRS is a LoxFas site. In certain embodiments, the integrated exogenous nucleotide sequence comprises three RRSs, one exogenous SOI, and one selection marker. In certain embodiments, the SOI is located between the first and the third RRS, and the selection marker is located between the third and the second RRS. In certain embodiments, the integrated exogenous nucleotide sequence comprises three RRSs, two exogenous SOIs, and one selection marker. In certain embodiments, the first SOI and the selection marker are located between the first and the third RRS, and the second SOI is located between the third and the second RRS.

[0268] In certain embodiments, the exogenous SOI encodes a polypeptide of interest. Such polypeptides of interest can be selected from the group including, but not limited to, an antibody, an enzyme, a cytokine, a growth factor, a hormone, a viral protein, a bacterial protein, a vaccine protein, or a protein with therapeutic function. In certain embodiments, the exogenous SOI encodes an antibody or an antigen-binding fragment thereof. In certain embodiments, the exogenous SOI encodes a single chain antibody, an antibody light chain, an antibody heavy chain, a single-chain Fv fragment (scFv), or an Fc fusion protein. In certain embodiments, the exogenous SOI (or SOIs) encodes a standard antibody. In certain embodiments, the exogenous SOI (or SOIs) encodes a half-antibody, for example, but not limited to, antibodies B, Q, T and mAb I of the present disclosure. In certain embodiments, the exogenous SOI (or SOIs) encodes a complex antibody. In certain embodiments, the complex antibody can be a bispecific antibody, for example, but not limited to, Bispecific Molecule A, Bispecific Molecule B, Bispecific Molecule C, or Bispecific Molecule D of the present disclosure. In certain embodiments, the exogenous SOI is operably linked to at least one cis-acting element, for example, a promoter or an enhancer. In certain embodiments, the exogenous SOI is operably linked to a CMV promoter.

[0269] In certain embodiments, the integrated exogenous nucleotide sequence comprises two RRSs and at least two exogenous SOIs located between the two RRSs. In certain embodiments, SOIs encoding one heavy chain and one light chain of an antibody are located between the two RRSs. In certain embodiments, SOIs encoding one heavy chain and two light chains of an antibody are located between the two RRSs. In certain embodiments, SOIs encoding different combinations of copies of heavy chain and light chain of an antibody are located between the two RRSs.

[0270] In certain embodiments, the integrated exogenous nucleotide sequence comprises three RRSs and at least two exogenous SOIs, and the third RRS is located between the first and the second RRS. In certain embodiments, at least one SOI is located between the first and the third RRS, and at least one SOI is located between the third and the second RRS. In certain embodiments, the first and the second RRS are the same and the third RRS is different from the first or the second RRS. In certain embodiments, all three RRSs are heterospecific. In certain embodiments, SOIs encoding one heavy chain and one light chain of a first antibody are located between the first and the third RRS, and SOIs encoding one heavy chain and one light chain of a second antibody are located between the third and the second RRS. In certain embodiments, SOIs encoding one heavy chain and two light chains of a first antibody are located between the first and the third RRS, and SOIs encoding one heavy chain and one light chain of a second antibody are located between the third RRS and the second RRS. In certain embodiments, SOIs encoding one heavy chain and three light chains of a first antibody are located between the first and the third RRS, and SOIs encoding one light chain of the first antibody and one heavy chain and one light chain of a second antibody are located between the third RRS and the second RRS. In certain embodiments, SOIs encoding one heavy chain and three light chains of a first antibody are located between the first and the third RRS, and SOIs encoding two light chains of the first antibody and one heavy chain and one light chain of a second antibody are located between the third RRS and the second RRS. In certain embodiments, SOIs encoding different combinations of copies of heavy chains and light chains of multiple antibodies are located between the first and the third RRS, and between the third and the second RRS.

[0271] In certain embodiments, the number of SOIs is selected to increase the titer and/or specific productivity of the host cells expressing the SOIs. For example, but not by way of limitation, the incorporation of two, three, four, five, six, seven, eight, or more SOIs can result in increased titer and/or specific productivity.

[0272] In the context of antibody expression, the inclusion of an additional heavy or light chain encoding SOIs can result in increased titer and/or specific productivity. For example, but not by way of limitation, when increasing copy number from one heavy chain and one light chain (HL) to one heavy chain and two light chain encoding sequences (HLL), an increase in titer and/or specific productivity can be achieved. Similarly, as outlined in the examples below, increasing from HLL (three SOIs) to HLL-HL (five SOIs) or HLL-HLL (six SOIs) can provide for an increase in titer and/or specific productivity. Additionally, increasing copy number to HLL-HL (five SOIs) or HLL-HLHL (seven SOIs) can provide for an increase in titer and/or specific productivity. Additional options for heavy and light chain SOI copy numbers include, but are not limited to HHL; HHL-H; HLL-H; HHL-HH; HHL-HL; HHL-LL; HLL-HH; HLL-HL; HLL-LL; HHL-HHL; HHL-HHH; HHL-HLL; HIIL-LLL; HLL-HHL; HLL-HHH; HLL-LLL; HHL-HIHL; HHL-HHHIH; HHL-HHLL; HHL-HLLL; HHL-LLLL; HLL-HIHL; HLL-HHHH; HLL-HLLL; and HLL-LLLL. In certain embodiments, the inclusion of additional copies occurs at a single genomic locus, while in certain embodiments the SOI copies can be integrated at two or more loci, e.g., multiple copies can be integrated at a single locus and one or more copies integrated at one or more additional loci.

[0273] In certain embodiments, the position of the SOIs, e.g., whether one SOI is located 3′ or 5′ relative to another SOI, is selected to increase the titer and/or specific productivity of the host cells expressing the SOIs. For example, but not by way of limitation, in the context of antibody production, the integrated position of heavy and light chain SOIs can result in increased titer and/or specific productivity. In certain embodiments, the relative position of heavy and light chain SOIs can impact the titer and specific productivity, despite no change in SOI copy number

[0274] In certain embodiments, targeted integration can be combined with transposon-mediated genomic integration. In certain embodiments, the targeted integration can be followed by transposon-mediated genomic integration. In certain embodiments, the targeted integration can be performed concurrently with transposon-mediated genomic integration. In certain embodiments, the targeted integration can be followed by transposon-mediated genomic integration.

### 4.3. Targeted Integration via Recombinase-Mediated Recombination

[0275] A “recombination recognition sequence” (RRS) is a nucleotide sequence recognized by a recombinase and is necessary and sufficient for recombinase-mediated recombination events. A RRS can be used to define the position where a recombination event will occur in a nucleotide sequence.

[0276] In certain embodiments, a RRS is selected from the group consisting of a LoxP sequence, a LoxP L3 sequence, a LoxP 2L sequence, a LoxFas sequence, a Lox511 sequence, a Lox2272 sequence, a Lox2372 sequence, a Lox5171 sequence, a Loxm2 sequence, a Lox71 sequence, a Lox66 sequence, a FRT sequence, a Bxb1 attP sequence, a Bxb1 attB sequence, a φC31 attP sequence, and a φC31 attB sequence.

[0277] In certain embodiments, a RRS can be recognized by a Cre recombinase. In certain embodiments, a RRS can be recognized by a FLP recombinase. In certain embodiments, a RRS can be recognized by a Bxb1 integrase. In certain embodiments, a RRS can be recognized by a φC31 integrase.

[0278] In certain embodiments when the RRS is a LoxP site, the host cell requires the Cre recombinase to perform the recombination. In certain embodiments when the RRS is a FRT site, the host cell requires the FLP recombinase to perform the recombination. In certain embodiments when the RRS is a Bxb1 attP or a Bxb1 attB site, the host cell requires the Bxb1 integrase to perform the recombination. In certain embodiments when the RRS is a φC31 attP or a φC31attB site, the host cell requires the φC31 integrase to perform the recombination. The recombinases can be introduced into a host cell using an expression vector comprising coding sequences of the enzymes.

[0279] The Cre-LoxP site-specific recombination system has been widely used in many biological experimental systems. Cre is a 38-kDa site-specific DNA recombinase that recognizes 34 bp LoxP sequences. Cre is derived from bacteriophase P1 and belongs to the tyrosine family site-specific recombinase. Cre recombinase can mediate both intra and intermolecular recombination between LoxP sequences. The LoxP sequence is composed of an 8 bp nonpalindromic core region flanked by two 13 bp inverted repeats. Cre recombinase binds to the 13 bp repeat thereby mediating recombination within the 8 bp core region. Cre-LoxP-mediated recombination occurs at a high efficiency and does not require any other host factors. If two LoxP sequences are placed in the same orientation on the same nucleotide sequence, Cre-mediated recombination will excise DNA sequences located between the two LoxP sequences as a covalently closed circle. If two LoxP sequences are placed in an inverted position on the same nucleotide sequence, Cre-mediated recombination will invert the orientation of the DNA sequences located between the two sequences. LoxP sequences can also be placed on different chromosomes to facilitate recombination between different chromosomes. If two LoxP sequences are on two different DNA molecules and if one DNA molecule is circular, Cre-mediated recombination will result in integration of the circular DNA sequence.

[0280] In certain embodiments, a LoxP sequence is a wild-type LoxP sequence. In certain embodiments, a LoxP sequence is a mutant LoxP sequence. Mutant LoxP sequences have been developed to increase the efficiency of Cre-mediated integration or replacement. In certain embodiments, a mutant LoxP sequence is selected from the group consisting of a LoxP L3 sequence, a LoxP 2L sequence, a LoxFas sequence, a Lox511 sequence, a Lox2272 sequence, a Lox2372 sequence, a Lox5171 sequence, a Loxm2 sequence, a Lox71 sequence, and a Lox66 sequence. For example, the Lox71 sequence has 5 bp mutated in the left 13 bp repeat. The Lox66 sequence has 5 bp mutated in the right 13 bp repeat. Both the wild-type and the mutant LoxP sequences can mediate Cre-dependent recombination.

[0281] The FLP-FRT site-specific recombination system is similar to the Cre-Lox system. It involves the flippase (FLP) recombinase, which is derived from the 2 μm plasmid of the yeast Saccharomyces cerevisiae. FLP also belongs to the tyrosine family site-specific recombinase. The FRT sequence is a 34 bp sequence that consists of two palindromic sequences of 13 bp each flanking an 8 bp spacer. FLP binds to the 13 bp palindromic sequences and mediates DNA break, exchange and ligation within the 8 bp spacer. Similar to the Cre recombinase, the position and orientation of the two FRT sequences determine the outcome of FLP-mediated recombination. In certain embodiments, a FRT sequence is a wild-type FRT sequence. In certain embodiments, a FRT sequence is a mutant FRT sequence. Both the wild-type and the mutant FRT sequences can mediate FLP-dependent recombination. In certain embodiments, a FRT sequence is fused to a responsive receptor domain sequence, such as, but not limited to, a tamoxifen responsive receptor domain sequence.

[0282] Bxb1 and φC31 belong to the serine recombinase family. They are both derived from bacteriophages and are used by these bacteriophages to establish lysogeny to facilitate site-specific integration of the phage genome into the bacterial genome. These integrases catalyze site-specific recombination events between short (40-60 bp) DNA substrates termed attP and attB sequences that are originally attachment sites located on the phage DNA and bacterial DNA, respectively. After recombination, two new sequences are formed, which are termed attL and attR sequences and each contains half sequences derived from attP and attB. Recombination can also occur between attL and attR sequences to excise the integrated phage out of the bacterial DNA. Both integrases can catalyze the recombination without the aid of any additional host factors. In the absence of any accessory factors, these integrases mediate unidirectional recombination between attP and attB with greater than 80% efficiency. Because of the short DNA sequences that can be recognized by these integrases and the unidirectional recombination, these recombination systems have been developed as a complement to the widely-used Cre-LoxP and FRT-FLP systems for genetic engineering purposes.

[0283] The terms “matching RRSs” and “homospecific RRSs” indicates that a recombination occurs between two RRSs. In certain embodiments, the two matching RRSs are the same. In certain embodiments, both RRSs are wild-type LoxP sequences. In certain embodiments, both RRSs are mutant LoxP sequences. In certain embodiments, both RRSs are wild-type FRT sequences. In certain embodiments, both RRSs are mutant FRT sequences. In certain embodiments, the two matching RRSs are different sequences but can be recognized by the same recombinase. In certain embodiments, the first matching RRS is a Bxb1 attP sequence and the second matching RRS is a Bxb1 attB sequence. In certain embodiments, the first matching RRS is a φC31 attB sequence and the second matching RRS is a φC31 attB sequence.

[0284] In certain embodiments, an integrated exogenous nucleotide sequence comprises two RRSs and a vector comprises two RRSs matching the two RRSs on the integrated exogenous nucleotide sequence, i.e., the first RRS on the integrated exogenous nucleotide sequence matches the first RRS on the vector and the second RRS on the integrated exogenous nucleotide sequence matches the second RRS on the vector. In certain embodiments, the first RRS on the integrated exogenous nucleotide sequence and the first RRS on the vector are the same as the second RRS on the integrated exogenous nucleotide sequence and the second RRS on the vector. A non-limiting example of such a “single-vector RMCE” strategy is presented in FIG. 2A of PCT Application PCT/US2018/067070 (Publication No. WO2019126634). In certain embodiments, the first RRS on the integrated exogenous nucleotide sequence and the first RRS on the vector are different from the second RRS on the integrated exogenous nucleotide sequence and the second RRS on the vector. In certain embodiments, the first RRS on the integrated exogenous nucleotide sequence and the first RRS on the vector are both LoxP L3 sequences, and the second RRS on the integrated exogenous nucleotide sequence and the second RRS on the vector are both LoxP 2L sequences.

[0285] In certain embodiments, a “two-vector RMCE” strategy is employed. For example, but not by way of limitation, an integrated exogenous nucleotide sequence could comprise three RRSs, e.g., an arrangement where the third RRS (“RRS3”) is present between the first RRS (“RRS1”) and the second RRS (“RRS2”), while a first vector comprises two RRSs matching the first and the third RRS on the integrated exogenous nucleotide sequence, and a second vector comprises two RRSs matching the third and the second RRS on the integrated exogenous nucleotide sequence.

[0286] An example of a two vector RMCE strategy is illustrated in FIG. 4 PCT Application PCT/US2018/067070 (Publication No. WO2019126634). In such an example, RRS1, RRS2, and RRS3 are heterospecific, e.g., they do not cross-react with each other. In some embodiments, one vector (front) comprises the RRS1, a first SOI and a promoter followed by a start codon and RRS3 (in this order). The other vector (back) comprises the RRS3 fused to the coding sequence of a marker without the start codon (ATG), an SOI 2 and the RRS2 (in this order). Additional nucleotides may be inserted between the RRS3 site and the selection marker sequence to ensure in frame translation for the fusion protein. In some embodiments, the first SOI encodes an antibody. In some embodiments, the antibody is a single chain antibody, an antibody light chain, an antibody heavy chain, a single-chain Fv fragment (scFv), or an Fc fusion protein. In some embodiments, the second SOI encodes an antibody. In some embodiments, the antibody is a single chain antibody, an antibody light chain, an antibody heavy chain, a single-chain Fv fragment (scFv), or an Fc fusion protein. In certain embodiments the antibodies encoded by the first and second SOIs pair to form a multispecific, e.g., bispecific antibody.

[0287] Such two vector RMCE strategies allow for the introduction of eight or more SOIs by incorporating the appropriate number of SOIs between each pair of RRSs.

[0288] Both single-vector and two-vector RMCE allow for unidirectional integration of one or more donor DNA molecule(s) into a pre-determined site of a host cell genome, and precise exchange of a DNA cassette present on the donor DNA with a DNA cassette on the host genome where the integration site resides. The DNA cassettes are characterized by two heterospecific RRSs flanking at least one selection marker (although in certain two-vector RMCE examples a “split selection marker” can be used as outlined herein) and/or at least one exogenous SOI. RMCE involves double recombination cross-over events, catalyzed by a recombinase, between the two heterospecific RRSs within the target genomic locus and the donor DNA molecule. RMCE is designed to introduce a copy of the SOI or selection marker into the pre-determined locus of a host cell genome. Unlike recombination which involves just one cross-over event, RMCE can be implemented such that prokaryotic vector sequences are not introduced into the host cell genome, thus reducing and/or preventing unwanted triggering of host immune or defense mechanisms. The RMCE procedure can be repeated with multiple DNA cassettes.

[0289] In certain embodiments, targeted integration is achieved by one cross-over recombination event, wherein one exogenous nucleotide sequence comprising one RRS adjacent to at least one exogenous SOI or at least one selection marker is integrated into a pre-determined site of a host cell genome. In certain embodiments, targeted integration is achieved by one RMCE, wherein a DNA cassette comprising at least an exogenous SOI or at least one selection marker flanked by two heterospecific RRSs is integrated into a pre-determined site of a host cell genome. In certain embodiments, targeted integration is achieved by two RMCEs, wherein two different DNA cassettes, each comprising at least an exogenous SOI or at least one selection marker flanked by two heterospecific RRSs, are both integrated into a pre-determined site of a host cell genome. In certain embodiments, targeted integration is achieved by multiple RMCEs, wherein DNA cassettes from multiple vectors, each comprising at least an exogenous SOI or at least one selection marker flanked by two heterospecific RRSs, are all integrated into a pre-determined site of a host cell genome. In certain embodiments the selection marker can be partially encoded on the first the vector and partially encoded on the second vector such that the integration of both RMCEs allows for the expression of the selection marker. An example of such a system is presented in FIG. 4 PCT Application PCT/US2018/067070 (Publication No. WO2019126634).

[0290] In certain embodiments, targeted integration via recombinase-mediated recombination leads to a selection marker or one or more exogenous SOI integrated into one or more pre-determined integration sites of a host cell genome along with sequences from a prokaryotic vector.

[0291] In certain embodiments, targeted integration via recombinase-mediated recombination leads to selection marker or one or more exogenous SOI integrated into one or more pre-determined integration sites of a host cell genome free of sequences from a prokaryotic vector.

### 4.4 Targeted Integration via Homologous Recombination, HDR, or NHEJ

[0292] The presently disclosed subject matter also relates to targeted integration mediated by homologous recombination or by an exogenous site-specific nuclease followed by HDR or NHEJ.

[0293] Homologous recombination is a recombination between DNA molecules that share extensive sequence homology. It can be used to direct error-free repair of double-stranded DNA breaks and generates sequence variation in gametes during meiosis. Since homologous recombination involves the exchange of genetic information between two homologous DNA molecules, it does not alter the overall arrangement of the genes on a chromosome. During homologous recombination, a nick or break forms in double-stranded DNA (dsDNA), followed by the invasion of a homologous dsDNA molecule by a single-stranded DNA end, pairing of homologous sequences, branch migration to form a Holliday junction, and final resolution of the Holliday junction.

[0294] Double-strand break (DSB) is the most severe form of DNA damage and repair of such DNA damage is essential for the maintenance of genome integrity in all organisms. There are two major repair pathways to repair DSBs. The first repair pathway is homology-directed repair (HDR) pathway and homologous recombination is the most common form of HDR. Since HDR requires the presence of homologous DNA present in the cell, this repair pathway is normally active in S and G2 phase of the cell cycle wherein newly replicated sister chromatids are available as homologous templates. HDR is also a major repair pathway to repair collapsed replication forks during DNA replication. HDR is considered as a relatively error-free repair pathway. The second repair pathway for DSBs is non-homologous end joining (NHEJ). NHEJ is a repair pathway wherein the ends of a broken DNA are ligated together without the requirement for a homologous DNA template.

[0295] Targeted integration can be facilitated by exogenous site-specific nucleases followed by HDR. This is due to that the frequency of homologous recombination can be increased by introducing a DSB at a specific target genomic site. In certain embodiments, an exogenous nuclease can be selected from the group consisting of a zinc finger nuclease (ZFN), a ZFN dimer, a transcription activator-like effector nuclease (TALEN), a TAL effector domain fusion protein, an RNA-guided DNA endonuclease, an engineered meganuclease, and a clustered regularly interspaced short palindromic repeats (CRISPR)-associated (Cas) endonuclease.

[0296] CRISPR/Cas and TALEN systems are two genome editing tools that offer the best ease of construction and high efficiency. CRISPR/Cas was identified as an immune defense mechanism of bacteria against invading bacteriophages. Cas is a nuclease that, when guided by a synthetic guide RNA (gRNA), is capable of associating with a specific nucleotide sequence in a cell and editing the DNA in or around that nucleotide sequence, for instance by making one or more of a single-strand break, a DSB, and/or a point mutation. TALEN is an engineered site-specific nuclease, which is composed of the DNA-binding domain of TALE (transcription activator-like effectors) and the catalytic domain of restriction endonuclease FokI. By changing the amino acids present in the highly variable residue region of the monomers of the DNA binding domain, different artificial TALENs can be created to target various nucleotides sequences. The DNA binding domain subsequently directs the nuclease to the target sequences and creates a DSB.

[0297] Targeted integration via homologous recombination or HIDR involves the presence of homologous sequences to the integration site. In certain embodiments, the homologous sequences are present on a vector. In certain embodiments, the homologous sequences are present on a polynucleotide.

[0298] In certain embodiments, a vector for targeted integration of exogenous nucleotide sequences into a host cell comprises nucleotide sequences homologous to an endogenous sequence comprising a portion of the contig sequence of one of the contigs NW_006874047.1, NW_006884592.1, NW_006881296.1, NW_003616412.1, NW_003615063.1, NW_006882936.1, and NW_003615411.1, or to a gene selected from the group consisting of LOC107977062, LOC100768845, ITPR2, ERE67000.1, UBAP2, MTMR2, and XP_003512331.2, or to a sequence selected from SEQ ID Nos. 1-7 flanking at least one selection marker. In certain embodiments, a vector for targeted integration of exogenous nucleotide sequences into a host cell comprises nucleotide sequences homologous to an endogenous sequence comprising a portion of the contig sequence of one of the contigs NW_006874047.1, NW_006884592.1, NW_006881296.1, NW_003616412.1, NW_003615063.1, NW_006882936.1, and NW_003615411.1 or to a gene selected from the group consisting of LOC107977062, LOC100768845, ITPR2, ERE67000.1, UBAP2, MTMR2, and XP_003512331.2, or to a sequence selected from SEQ ID Nos. 1-7 flanking at least one selection marker and at least one exogenous SOI. In certain embodiments, a vector for targeted integration of exogenous nucleotide sequences into a host cell comprises nucleotide sequences at least 50% homologous to a sequence selected from a portion of the contig sequence of one of the contigs NW_006874047.1, NW_006884592.1, NW_006881296.1, NW_003616412.1, NW_003615063.1, NW_006882936.1, and NW_003615411.1, and SEQ ID Nos. 1-7 flanking a DNA cassette, wherein the DNA cassette comprises at least one selection marker and at least one exogenous SOI flanked by two RRSs. In certain embodiments, a vector for targeted integration of exogenous nucleotide sequences into a host cell comprises nucleotide sequences at least 50% homologous to an endogenous a sequence of a portion of the contig sequence of one of the contigs NW_006874047.1, NW_006884592.1, NW_006881296.1, NW_003616412.1, NW_003615063.1, NW_006882936.1, and NW_003615411.1, or to a gene selected from the group consisting of LOC107977062, LOC100768845, ITPR2, ERE67000.1, UBAP2, MTMR2, and XP_003512331.2 flanking a DNA cassette, wherein the DNA cassette comprises at least one selection marker and at least one exogenous SOI flanked by two RRSs. In certain embodiments, the vector nucleotide sequences are at least about 50%, at least about 60%, at least about 70%, at least about 80%, at least about 90%, at least about 95%, at least about 99%, or at least about 99.9% homologous to an endogenous sequence of a portion of the contig sequence of one of the contigs NW_006874047.1, NW_006884592.1, NW_006881296.1, NW_003616412.1, NW_003615063.1, NW_006882936.1, and NW_003615411.1 or to a gene selected from the group consisting of LOC107977062, LOC100768845, ITPR2, ERE67000.1, UBAP2, MTMR2, and XP_003512331.2, or to a sequence selected from SEQ ID Nos. 1-7. In certain embodiments, the vector is selected from the group consisting of an adenovirus vector, an adeno-associated virus vector, a lentivirus vector, a retrovirus vector, an integrating phage vector, a non-viral vector, a transposon and/or transposase vector, an integrase substrate, and a plasmid.

[0299] In certain embodiments, a polynucleotide for targeted integration of exogenous nucleotide sequences into a host cell comprises nucleotide sequences homologous to an endogenous sequence of a portion of the contig sequence of one of the contigs NW_006874047.1, NW_006884592.1, NW_006881296.1, NW_003616412.1, NW_003615063.1, NW_006882936.1, and NW_003615411.1 or to a gene selected from the group consisting of LOC107977062, LOC100768845, ITPR2, ERE67000.1, UBAP2, MTMR2, and XP_003512331.2, or to a sequence selected from SEQ ID Nos. 1-7 flanking at least one selection marker. In certain embodiments, a polynucleotide for targeted integration of exogenous nucleotide sequences into a host cell comprises nucleotide sequences homologous to an endogenous sequence of a portion of the contig sequence of one of the contigs NW_006874047.1, NW_006884592.1, NW_006881296.1, NW_003616412.1, NW_003615063.1, NW_006882936.1, and NW_003615411.1 or to a gene selected from the group consisting of LOC107977062, LOC100768845, ITPR2, ERE67000.1, UBAP2, MTMR2, and XP_003512331.2, or to a sequence selected from SEQ ID Nos. 1-7 flanking at least one selection marker and at least one exogenous SOI. In certain embodiments, a polynucleotide for targeted integration of exogenous nucleotide sequences into a host cell comprises nucleotide sequences at least 50% homologous to a sequence selected from SEQ ID Nos. 1-7 flanking a DNA cassette, wherein the DNA cassette comprises at least one selection marker and at least one exogenous SOI flanked by two RRSs. In certain embodiments, a polynucleotide for targeted integration of exogenous nucleotide sequences into a host cell comprises nucleotide sequences at least 50% homologous to an endogenous sequence of a portion of the contig sequence of one of the contigs NW_006874047.1, NW_006884592.1, NW_006881296.1, NW_003616412.1, NW_003615063.1, NW_006882936.1, and NW_003615411.1 or to a gene selected from the group consisting of LOC107977062, LOC100768845, ITPR2, ERE67000.1, UBAP2, MTMR2, and XP_003512331.2 flanking a DNA cassette, wherein the DNA cassette comprises at least one selection marker and at least one exogenous SOI flanked by two RRSs. In certain embodiments, the flanking nucleotide sequences are at least about 50%, at least about 60%, at least about 70%, at least about 80%, at least about 90%, at least about 95%, at least about 99%, or at least about 99.9% homologous to an endogenous sequence of a portion of the contig sequence of one of the contigs NW_006874047.1, NW_006884592.1, NW_006881296.1, NW_003616412.1, NW_003615063.1, NW_006882936.1, and NW_003615411.1 or to a gene selected from the group consisting of LOC107977062, LOC100768845, ITPR2, ERE67000.1, UBAP2, MTMR2, and XP_003512331.2, or to a sequence selected from SEQ ID Nos. 1-7.

[0300] In certain embodiments, homologous recombination is carried out without any accessory factors. In certain embodiments, homologous recombination is facilitated by the presence of vectors that are capable of integration. In certain embodiments, an integrating vector is selected from the group consisting of an adeno-associated virus vector, a lentivirus vector, a retrovirus vector, and an integrating phage vector.

### 4.5 Transposon-Mediated Genomic Integration

[0301] The presently disclosed subject matter also contemplates, in certain embodiments, transposon-mediated genomic integration of one or more exogenous nucleic acids into a host cell. As outlined herein, in certain embodiments, the targeted integration can be performed concurrently with transposon-mediated genomic integration can be performed concurrently with targeted integration. In certain embodiments, transposon-mediated genomic integration can be followed by targeted integration. In certain embodiments, transposon-mediated genomic integration can be preceded by targeted integration.

[0302] Transposons useful in connection with the methods described herein are known in the art and include, but are not limited to, the following:
[0303] piggyBac transposons (see, e.g., Wilson et. al., Molecular Therapy, 15(1):139-145 (2007));
[0304] sleeping beauty transposons (see, e.g., Ivics et al., Cell 91:501-510 (1997)); and
[0305] Tol2 transposons (see, e.g., Balciunas et al., PLoS Genent. November 10; 2 (11):e169. doi: 10.1371/journal.pgen.0020169. Epub 2006 Aug. 28).

[0306] In general, the transposons useful in connection with the methods of the instant disclosure translocate via a non-replicative, ‘cut-and-paste’ mechanism. For example, while not being bound by theory, transposition catalyzed by transposons useful in connection with the methods described herein, can proceed by the recognition of two terminal inverted repeats (TIRs) by a DNA transposase that cleaves its target and consequently releases the DNA transposon from its donor sequence (e.g., donor plasmid). Upon excision, the transposons can integrate into the host cell genome cleaved by the same transposase at a corresponding sequence within the genome.

### 4.6 Regulated Expression of SOIs

[0307] There are many cases where protein expression levels are not optimal mainly because the encoded proteins are difficult-to-express. The low expression level of difficult-to-express proteins can have diverse and difficult to identify causes. One possibility is the toxicity of the expressed proteins in the host cells. In such cases, a regulated expression system can be used to express toxic proteins where the sequences of interest encoding the proteins are under the control of an inducible promoter. In these systems, expression of the difficult-to-express proteins is only prompted when a regulator, e.g., small molecule, such as, but not limited to, tetracycline or its analogue, doxycycline (DOX), is added to the culture. Regulating the expression of toxic proteins could alleviate the toxic effects, allowing the cultures to achieve the desired cell growth prior to production. In certain embodiments, a regulated expression system comprises at least one SOI that is transcribed under a regulated promoter operably linked thereto. In certain embodiments, regulated expression system can be used to determine the underlying causes of low protein expression for a difficult-to-express molecule, such as, but not limited to, an antibody. In certain embodiments, the ability to selectively turn off the expression of a SOI in a regulated expression system can be used to link expression of a SOI to an observed adverse effect.

[0308] In certain embodiments, to minimize transcriptional and cell line variability effects during the root cause analysis of difficult-to-express molecules, a regulated expression system can be used. For example, but not by way of limitation, the expression of the SOI can be triggered by addition to the culture of a regulator, e.g., doxycycline. In certain embodiments, the regulated expression vector utilizes a tetracycline-regulated promoter to express the SOI, allowing for regulated expression of the SOI.

[0309] In certain embodiments, the regulated expression system described in the present disclosure can be used to successfully determine the underlying cause(s) of low protein expression of an SOI, e.g., a therapeutic antibody, as compared to control cell line. In certain embodiments, once the lower relative expression of a SOI, e.g., a therapeutic antibody, in a regulated expression cell line is confirmed, the intracellular accumulation and secretion levels of the SOI can be evaluated by leveraging protein translation inhibitor treatments, e.g., Dox and cycloheximide.

[0310] As outlined in detail herein, regulated expression can be based on gene switches for blocking or activating mRNA synthesis by regulated coupling of transcriptional repressors or activators to constitutive or minimal promoters. In certain non-limiting embodiments, repression can be achieved by binding the repressor proteins, e.g., where the proteins sterically block transcriptional initiation, or by actively repressing transcription through transcriptional silencers. In certain non-limiting embodiments, activation of mammalian or viral enhancerless minimal promoters can be achieved by the regulated coupling to an activation domain.

[0311] In certain embodiments, the conditional coupling of transcriptional repressors or activators can be achieved by using allosteric proteins that bind the promoters in response to external stimuli. In certain embodiments, the conditional coupling of transcriptional repressors or activators can be achieved by using intracellular receptors that are released from sequestrating proteins and, thus, can bind target promoters. In certain embodiments, the conditional coupling of transcriptional repressors or activators can be achieved by using chemically induced dimerizers.

[0312] In certain embodiments, the allosteric proteins used in the regulated expression systems of the present disclosure can be proteins that modulate transcriptional activity in response to antibiotics, bacterial quorum-sensing messengers, catabolites, or to the cultivation parameters, such as temperature, e.g., cold or heat. In certain embodiments, such regulated expression systems can be catabolite-based, e.g., where a bacterial repressor that controls catabolic genes for alternative carbon sources has been transferred to mammalian cells. In certain embodiments, the repression of the target promoter can be achieved by cumate-responsive binding of the repressor CymR. In certain embodiments, the catabolite-based system can rely on the activation of chimeric promoters by 6-hydroxynicotine-responsive binding of the prokaryotic repressor HdnoR, fused to the Herpes simplex VP16 transactivation domain.

[0313] In certain embodiments, the regulated expression system of the present disclosure can employ a quorum-sensing-based expression system originated from prokaryotes that manage intra- and inter-population communication by quorum-sensing molecules. These quorum-sensing molecules bind to receptors in target cells, modulate the receptors' affinity to cognate promoters leading to the initiation of specific regulon switches. In certain embodiments, the quorum-sensing molecule can be the N-(3-oxo-octanoyl)-homoserine lactone in the presence of which, the TraR-p65 fusion protein activates expression from a minimal promoter fused to the TraR-specific operator sequence. In certain embodiments, the quorum-sensing molecule can be the butyrolactone SCB1 (racemic 2-(1′-hydroxy-6-methylheptyl)-3-(hydroxymethyl)-butanolide) in a system based on the Streptomyces coelicolor A3(2) ScbR repressor that binds its cognate operator OScbR in the absence of the SCB1. In certain embodiments, the quorum-sensing molecule can be homoserine-derived inducers used in a RTI system wherein Pseudomonas aeruginosa quorum-sensing repressors RhlR and LasR are fused to the SV40 T-antigen nuclear localization sequence and the Herpes simplex VP16 domain and can activate promoters containing specific operator sequences (las boxes).

[0314] In certain embodiments, the inducing molecules that modulate the allosteric proteins used in the regulated expression systems of the present disclosure can be, but are not limited to, cumate, isopropyl-β-D-galactopyranoside (IPTG), macrolides, 6-hydroxynicotine, doxycycline, streptogramins, NADH, tetracycline.

[0315] In certain embodiments, the intracellular receptors used in the regulated expression systems of the present disclosure can be cytoplasmic or nuclear receptors. In certain embodiments, the regulated expression systems of the present disclosure can utilize the release of transcription factors from sequestering and inhibiting proteins by using small molecules. In certain embodiments, the regulated expression systems of the present disclosure can rely on steroid-regulation, wherein a hormone receptor is fused to a natural or an artificial transcription factor that can be released from HSP90 in the cytosol, migrate into the nucleus and activate selected promoters. In certain embodiments, mutant receptors can be used that are regulated by synthetic steroid analogs in order to avoid crosstalk by endogenous steroid hormones. In certain embodiments the receptors can be an estrogen receptor variant responsive to 4-hydroxytamoxifen or a progesterone-receptor mutant inducible by RU486. In certain embodiments, the nuclear receptor-derived rosiglitazone-responsive transcription switch based on the human nuclear peroxisome proliferator-activated receptor γ(PPARγ) can be used in the regulated expression systems of the present disclosure. In certain embodiments, a variant of steroid-responsive receptors can be the RheoSwitch, that is based on a modified Choristoneura fumiferana ecdysone receptor and the mouse retinoid X receptor (RXR) fused to the Gal4 DNA binding domain and the VP16 trans-activator. In the presence of synthetic ecdysone, the RheoSwitch variant can bind and activate a minimal promoter fused to several repeats of the Gal4-response element.

[0316] In certain embodiments, the regulated expression systems disclosed herein can utilize chemically induced dimerization of a DNA-binding protein and a transcriptional activator for the activation of a minimal core promoter fused with a cognate operator. In certain embodiments, the regulated expression systems disclosed herein can utilize the rapamycin-regulated dimerization of FKBP with FRB. In this system the FRB is fused to the p65 trans-activator and FKBP is fused to a zinc finger domain specific for cognate operator sites placed upstream of an engineered minimal interleukin-12 promoter. In certain embodiments, the FKBP can be mutated. In certain embodiments, the regulated expression systems disclosed herein can utilize bacterial gyrase B subunit (GyrB), where GyrB dimerizes in the presence of the antibiotic coumermycin and dissociates with novobiocin.

[0317] In certain embodiments, the regulated expression systems of the present disclosure can be used for regulated siRNA expression. In certain embodiments, the regulated siRNA expression system can be a tetracycline, a macrolide, or an OFF- and ON-type QuoRex system. In certain embodiments, the RTI system can utilize a Xenopus terminal oligopyrimidine element (TOP), which blocks translational initiation by forming hairpin structures in the 5′ untranslated region.

[0318] In certain embodiments, the regulated expression systems described in the present disclosure can utilize gas-phase controlled expression, e.g., acetaldehyde-induced regulation (AIR) system. The AIR system can employ the Aspergillus nidulans AlcR transcription factor, which specifically activates the PAIR promoter assembled from AlcR-specific operators fused to the minimal human cytomegalovirus promoter in the presence of gaseous or liquid acetaldehyde at nontoxic concentrations.

[0319] In certain embodiments, the regulated expression systems of the present disclosure can utilize a Tet-On or a Tet-Off system. In such systems, expression of a one or more SOIs can be regulated by tetracycline or its analogue, doxycycline.

[0320] In certain embodiments, the regulated expression system of the present disclosure can utilize a PIP-on or a PIP-off system. In such systems, the expression of SOIs can be regulated by, e.g., pristinamycin, tetracycline and/or erythromycin.

### 5. Preparation and Use of RVLP-Reduced Host Cells

[0321] The presently disclosed subject matter relates to methods for the targeted integration of exogenous nucleotide sequences into a host cell. In certain embodiments, the methods relate to the integration of an exogenous nucleotide sequence into a host cell to produce a host cell suitable for subsequent targeted integration of a SOI. In certain embodiments, said methods comprise recombinase-mediated recombination. In certain embodiments, said methods involve homologous recombination, HDR, and/or NHEJ.

[0322] In certain embodiments, the presently disclosed subject matter relates to methods for the targeted integration of exogenous nucleotide sequences into a host cell in combination with transposon-mediated genomic integration of exogenous nucleotide sequences into the same host cell. In certain embodiments, the methods relate to the integration of an exogenous nucleotide sequence into a host cell to produce a host cell suitable for subsequent targeted integration of a SOI in combination with transposon-mediated genomic integration of a same or different SOI. In certain embodiments, said methods comprise recombinase-mediated recombination. In certain embodiments, said methods involve homologous recombination, HDR, and/or NHEJ.

[0323] In certain embodiments, polypeptide of interest is produced and secreted into the cell culture medium. In certain embodiments, polypeptide of interest is expressed and retained within the host cell. In certain embodiments, polypeptide of interest is expressed, inserted into, and retained in the host cell membrane.

[0324] Exogenous nucleotides of interest or vectors can be introduced into a host cell by conventional cell biology methods including, but not limited to, transfection, transduction, electroporation, or injection. In certain embodiments, exogenous nucleotides of interest or vectors are introduced into a host cell by chemical-based transfection methods comprising lipid-based transfection method, calcium phosphate-based transfection method, cationic polymer-based transfection method, or nanoparticle-based transfection. In certain embodiments, exogenous nucleotides of interest are introduced into a host cell by virus-mediated transduction including, but not limited to, lentivirus, retrovirus, adenovirus, or adeno-associated virus-mediated transduction. In certain embodiments, exogenous nucleotides of interest or vectors are introduced into a host cell via gene gun-mediated injection. In certain embodiments, both DNA and RNA molecules are introduced into a host cell using methods described herein.

### 5.1 Preparation of TI Host Cells Using Recombinase-Mediated Recombination

[0325] In certain embodiments, the present disclosure provides methods for preparing TI host cells to express a polypeptide of interest comprising: a) providing a TI host cell comprising an exogenous nucleotide sequence integrated at a site within a locus of the genome of the host cell, wherein the locus is at least about 90% homologous to SEQ ID Nos. 1-7, wherein the exogenous nucleotide sequence comprises two RRSs, flanking at least one first selection marker; b) introducing into the cell provided in a) a vector comprising two RRSs matching the two RRSs on the integrated exogenous nucleotide sequence and flanking at least one exogenous SOI and at least one second selection marker; c) introducing a recombinase, wherein the recombinase recognizes the RRSs; and d) selecting for TI cells expressing the second selection marker to thereby isolate a TI host cell expressing the polypeptide of interest.

[0326] In certain embodiments, the present disclosure provides methods for preparing TI host cells to express a polypeptide of interest comprising: a) providing a TI host cell comprising an exogenous nucleotide sequence integrated at a site within an endogenous gene selected from the group consisting of LOC107977062, LOC100768845, ITPR2, ERE67000.1, UBAP2, MTMR2, XP_003512331.2, and at least about 90% homologous sequences thereof, wherein the exogenous nucleotide sequence comprises two RRSs, flanking at least one first selection marker; b) introducing into the cell provided in a) a vector comprising two RRSs matching the two RRSs on the integrated exogenous nucleotide sequence and flanking at least one exogenous SOI and at least one second selection marker; c) introducing a recombinase, wherein the recombinase recognizes the RRSs; and d) selecting for TI cells expressing the second selection marker to thereby isolate a TI host cell expressing the polypeptide of interest.

[0327] In certain embodiments, the present disclosure provides methods for preparing TI host cells to express a polypeptide of interest comprising: a) providing a TI host cell comprising an exogenous nucleotide sequence integrated at a site within a locus of the genome of the TI host cell, wherein the locus is at least about 90% homologous to SEQ ID Nos. 1-7, wherein the exogenous nucleotide sequence comprises a first DNA cassette comprising two heterospecific RRSs, flanking at least one first selection marker; b) introducing into the cell provided in a) a vector comprising a second DNA cassette comprising two heterospecific RRSs matching the two RRSs on the integrated exogenous nucleotide sequence and flanking at least one exogenous SOI and at least one second selection marker; c) introducing a recombinase, wherein the recombinase recognizes the RRSs and performs one RMCE; and d) selecting for TI cells expressing the second selection marker to thereby isolate a TI host cell expressing the polypeptide of interest.

[0328] In certain embodiments, the present disclosure provides methods for preparing TI host cells to express a polypeptide of interest comprising: a) providing a TI host cell comprising an exogenous nucleotide sequence integrated at a site within an endogenous sequence comprising all or a portion of the contig sequence of one of the contigs NW_006874047.1, NW_006884592.1, NW_006881296.1, NW_003616412.1, NW_003615063.1, NW_006882936.1, and NW_003615411.1 or to a gene selected from the group consisting of LOC107977062, LOC100768845, ITPR2, ERE67000.1, UBAP2, MTMR2, XP_003512331.2, and at least about 90% homologous sequences thereof, wherein the exogenous nucleotide sequence comprises a first DNA cassette comprising two heterospecific RRSs, flanking at least one first selection marker; b) introducing into the cell provided in a) a vector comprising a second DNA cassette comprising two heterospecific RRSs matching the two RRSs on the integrated exogenous nucleotide sequence and flanking at least one exogenous SOI and at least one second selection marker; c) introducing a recombinase, wherein the recombinase recognizes the RRSs and performs one RMCE; and d) selecting for TI cells expressing the second selection marker to thereby isolate a TI host cell expressing the polypeptide of interest.

[0329] In certain embodiments, the present disclosure provides methods for preparing TI host cells to express a first and second polypeptide of interest (where the first and second polypeptides can be the same or different) comprising: a) providing a TI host cell comprising an exogenous nucleotide sequence integrated at a site within a locus of the genome of the host cell, wherein the locus comprises a sequence that is at least about 90% homologous to all or a portion of the contig sequence of one of the contigs NW_006874047.1, NW_006884592.1, NW_006881296.1, NW 003616412.1, NW 003615063.1, NW_006882936.1, and NW_003615411.1 or to a SEQ ID Nos. 1-7, wherein the exogenous nucleotide sequence comprises a first and a second RRS flanking at least one first selection marker, and a third RRS located between the first and the second RRS, and all the RRSs are heterospecific; b) introducing into the cell provided in a) a first vector comprising two RRSs matching the first and the third RRS on the integrated exogenous nucleotide sequence and flanking at least one first exogenous SOI and at least one second selection marker; c) introducing into the cell provided in a) a second vector comprising two RRSs matching the second and the third RRS on the integrated exogenous nucleotide sequence and flanking at least one second exogenous SOI; d) introducing one or more recombinases, wherein the one or more recombinases recognize the RRSs; and e) selecting for TI cells expressing the second selection marker to thereby isolate a TI host cell expressing the first and second polypeptides of interest. In certain embodiments, rather than have the entire selection maker on the first vector, the first vector comprises a promoter sequence operably linked to the codon ATG positioned flanked upstream by the first SOI and downstream by an RRS; and the second vector comprises a selection marker lacking an ATG transcription start codon flanked upstream by an RRS and downstream by the second SOI.

[0330] In certain embodiments, the present disclosure provides methods for preparing TI host cells to express a first and second polypeptide of interest (where the first and second polypeptides can be the same or different) comprising: a) providing a TI host cell comprising an exogenous nucleotide sequence integrated at a site within an endogenous sequence comprising all or a portion of the contig sequence of one of the contigs NW_006874047.1, NW_006884592.1, NW_006881296.1, NW_003616412.1, NW_003615063.1, NW_006882936.1, and NW_003615411.1 or to a gene selected from the group consisting of LOC107977062, LOC100768845, ITPR2, ERE67000.1, UBAP2, MTMR2, XP_003512331.2, and at least about 90% homologous sequences thereof, wherein the exogenous nucleotide sequence comprises a first and a second RRS flanking at least one first selection marker, and a third RRS located between the first and the second RRS, and all the RRSs are heterospecific; b) introducing into the cell provided in a) a first vector comprising two RRSs matching the first and the third RRS on the integrated exogenous nucleotide sequence and flanking at least one first exogenous SOI and at least one second selection marker; c) introducing into the cell provided in a) a second vector comprising two RRSs matching the second and the third RRS on the integrated exogenous nucleotide sequence and flanking at least one second exogenous SOI; d) introducing one or more recombinases, wherein the one or more recombinases recognize the RRSs; and e) selecting for TI cells expressing the second selection marker to thereby isolate a TI host cell expressing the first and second polypeptides of interest. In certain embodiments, rather than have the entire selection maker on the first vector, the first vector comprises a promoter sequence operably linked to the codon ATG positioned flanked upstream by the first SOI and downstream by an RRS; and the second vector comprises a selection marker lacking an ATG transcription start codon flanked upstream by an RRS and downstream by the second SOI.

[0331] In certain embodiments, the present disclosure provides methods for preparing TI host cells to express a first and second polypeptide of interest (where the first and second polypeptides can be the same or different) comprising: a) providing a TI host cell comprising an exogenous nucleotide sequence integrated at a site within a locus of the genome of the host cell, wherein the locus is at least about 90% homologous to a sequence comprising all or a portion of the contig sequence of one of the contigs NW_006874047.1, NW_006884592.1, NW_006881296.1, NW 003616412.1, NW_003615063.1, NW_006882936.1, and NW_003615411.1 or to SEQ ID Nos. 1-7, wherein the exogenous nucleotide sequence comprises a first DNA cassette comprising a first and a second RRS flanking at least one first selection marker, and a third RRS located between the first and the second RRS, and all three RRSs are heterospecific; b) introducing into the cell provided in a) a first vector comprising a second DNA cassette, wherein the second DNA cassette comprises two heterospecific RRSs matching the first and the third RRS of the first DNA cassette and flanking at least one first exogenous SOI and at least one second selection marker; c) introducing into the cell provided in a) a second vector comprising a third DNA cassette, wherein the third DNA cassette comprises two heterospecific RRSs matching the second and the third RRS of the first DNA cassette and flanking at least one second exogenous SOI; d) introducing one or more recombinases, wherein the one or more recombinases recognize the RRSs and perform two RMCEs; and e) selecting for TI cells expressing the second selection marker to thereby isolate a TI host cell expressing the first and second polypeptides of interest. In certain embodiments, rather than have the entire selection maker on the first vector, the first vector comprises a promoter sequence operably linked to the codon ATG positioned flanked upstream by the first SOI and downstream by an RRS; and the second vector comprises a selection marker lacking an ATG transcription start codon flanked upstream by an RRS and downstream by the second SOI.

[0332] In certain embodiments, the present disclosure provides methods for preparing TI host cells to express a first and second polypeptide of interest (where the first and second polypeptides can be the same or different) comprising: a) providing a TI host cell comprising an exogenous nucleotide sequence integrated at a site within an endogenous sequence comprising all or a portion of the contig sequence of one of the contigs NW_006874047.1, NW_006884592.1, NW_006881296.1, NW_003616412.1, NW_003615063.1, NW_006882936.1, and NW_003615411.1 or to a gene selected from the group consisting of LOC107977062, LOC100768845, ITPR2, ERE67000.1, UBAP2, MTMR2, XP_003512331.2, and sequences at least about 90% homologous thereto, wherein the exogenous nucleotide sequence comprises a first DNA cassette comprising a first and a second RRS flanking at least one first selection marker, and a third RRS located between the first and the second RRS, and all three RRSs are heterospecific; b) introducing into the cell provided in a) a first vector comprising a second DNA cassette, wherein the second DNA cassette comprises two heterospecific RRSs matching the first and the third RRS of the first DNA cassette and flanking at least one first exogenous SOI and at least one second selection marker; c) introducing into the cell provided in a) a second vector comprising a third DNA cassette, wherein the third DNA cassette comprises two heterospecific RRSs matching the second and the third RRS of the first DNA cassette and flanking at least one second exogenous SOI; d) introducing one or more recombinases, wherein the one or more recombinases recognize the RRSs and perform two RMCEs; and e) selecting for TI cells expressing the second selection marker to thereby isolate a TI host cell expressing the first and second polypeptides of interest. In certain embodiments, rather than have the entire selection maker on the first vector, the first vector comprises a promoter sequence operably linked to the codon ATG positioned flanked upstream by the first SOI and downstream by an RRS; and the second vector comprises a selection marker lacking an ATG transcription start codon flanked upstream by an RRS and downstream by the second SOI.

[0333] In certain embodiments, the present disclosure provides methods for preparing TI host cells to express a polypeptide of interest comprising: a) providing a TI host cell comprising an exogenous nucleotide sequence integrated at a site within a locus of the genome of the host cell, wherein the locus is at least about 90% homologous to a sequence comprising all or a portion of the contig sequence of one of the contigs NW_006874047.1, NW_006884592.1, NW_006881296.1, NW_003616412.1, NW_003615063.1, NW_006882936.1, and NW_003615411.1 or to SEQ ID Nos. 1-7, wherein the exogenous nucleotide sequence comprises one RRS adjacent to at least one first selection marker; b) introducing into the cell provided in a) a vector comprising one RRS matching the RRS on the integrated exogenous nucleotide sequence and adjacent to at least one exogenous SOI and at least one second selection marker; c) introducing a recombinase, wherein the recombinase recognizes the RRSs; and d) selecting for TI cells expressing the second selection marker to thereby isolate a TI host cell expressing the polypeptide of interest.

[0334] In certain embodiments, the present disclosure provides methods for preparing TI host cells to express a polypeptide of interest comprising: a) providing a TI host cell comprising an exogenous nucleotide sequence integrated at a site within an endogenous sequence comprising all or a portion of the contig sequence of one of the contigs NW_006874047.1, NW_006884592.1, NW_006881296.1, NW_003616412.1, NW_003615063.1, NW_006882936.1, and NW_003615411.1 or to a gene selected from the group consisting of LOC107977062, LOC100768845, ITPR2, ERE67000.1, UBAP2, MTMR2, XP_003512331.2, and sequences at least about 90% homologous thereto, wherein the exogenous nucleotide sequence comprises one RRS adjacent to at least one first selection marker; b) introducing into the cell provided in a) a vector comprising one RRS matching the RRS on the integrated exogenous nucleotide sequence and adjacent to at least one exogenous SOI and at least one second selection marker; c) introducing a recombinase, wherein the recombinase recognizes the RRSs; and d) selecting for TI cells expressing the second selection marker to thereby isolate a TI host cell expressing the polypeptide of interest.

[0335] The presently disclosed subject matter also relates to methods of producing a polypeptide of interest comprising: a) providing a TI host cell described herein; b) culturing the TI host cell in a) under conditions suitable for expressing the SOI and recovering a polypeptide of interest therefrom.

[0336] In certain embodiments, the present disclosure provides methods for preparing TI host cells suitable for subsequent targeted integration comprising: a) providing a TI host cell comprising an exogenous nucleotide sequence integrated at a site within a locus of the genome of the host cell, wherein the locus is at least about 90% homologous to a sequence comprising all or a portion of the contig sequence of one of the contigs NW_006874047.1, NW_006884592.1, NW_006881296.1, NW_003616412.1, NW_003615063.1, NW_006882936.1, and NW_003615411.1 or to a sequence selected from SEQ ID Nos. 1-7, wherein the exogenous nucleotide sequence comprises two RRSs flanking at least one exogenous SOI and at least one first selection marker; b) introducing into the cell provided in a) a vector comprising two RRSs matching the two RRSs on the integrated exogenous nucleotide sequence and flanking at least one second selection marker; c) introducing a recombinase, wherein the recombinase recognizes the RRSs; and d) selecting for TI cells expressing the second selection marker to thereby isolate a TI host cell suitable for subsequent targeted integration.

[0337] In certain embodiments, the present disclosure provides methods for preparing TI host cells suitable for subsequent targeted integration comprising: a) providing a TI host cell comprising an exogenous nucleotide sequence integrated at a site within an endogenous sequence comprising all or a portion of the contig sequence of one of the contigs NW_006874047.1, NW_006884592.1, NW_006881296.1, NW_003616412.1, NW_003615063.1, NW_006882936.1, and NW_003615411.1 or to a gene selected from the group consisting of LOC107977062, LOC100768845, ITPR2, ERE67000.1, UBAP2, MTMR2, XP_003512331.2, and sequences at least about 90% homologous thereto, wherein the exogenous nucleotide sequence comprises two RRSs flanking at least one exogenous SOI and at least one first selection marker; b) introducing into the cell provided in a) a vector comprising two RRSs matching the two RRSs on the integrated exogenous nucleotide sequence and flanking at least one second selection marker; c) introducing a recombinase, wherein the recombinase recognizes the RRSs; and d) selecting for TI cells expressing the second selection marker to thereby isolate a TI host cell suitable for subsequent targeted integration.

[0338] In certain embodiments, the present disclosure provides methods for preparing TI host cells suitable for subsequent targeted integration comprising: a) providing a TI host cell comprising an exogenous nucleotide sequence integrated at a site within a locus of the genome of the host cell, wherein the locus is at least about 90% homologous to a sequence comprising all or a portion of the contig sequence of one of the contigs NW_006874047.1, NW_006884592.1, NW_006881296.1, NW_003616412.1, NW_003615063.1, NW_006882936.1, and NW_003615411.1 or to a sequence selected from SEQ ID Nos. 1-7, wherein the exogenous nucleotide sequence comprises a first and a second RRS flanking at least one exogenous SOI and at least one first selection marker; b) introducing into the cell provided in a) a vector comprising three RRSs, wherein the first RRS of the vector matches the first RRS on the integrated exogenous nucleotide sequence, the second RRS of the vector matches the second RRS on the integrated exogenous nucleotide sequence, and at least one second selection marker located between the first and the second RRS; c) introducing a recombinase, wherein the recombinase recognizes the first and the second RRS on both the vector and the integrated exogenous nucleotide sequence; and d) selecting for TI host cells expressing the second selection marker to thereby isolate a TI host cell suitable for subsequence targeted integration.

[0339] In certain embodiments, the present disclosure provides methods for preparing TI host cells suitable for subsequent targeted integration comprising: a) providing a TI host cell comprising an exogenous nucleotide sequence integrated at a site within an endogenous sequence comprising all or a portion of the contig sequence of one of the contigs NW_006874047.1, NW_006884592.1, NW_006881296.1, NW_003616412.1, NW_003615063.1, NW_006882936.1, and NW_003615411.1 or to a gene selected from the group consisting of LOC107977062, LOC100768845, ITPR2, ERE67000.1, UBAP2, MTMR2, XP_003512331.2, and sequences at least about 90% homologous thereto, wherein the exogenous nucleotide sequence comprises a first and a second RRS flanking at least one exogenous SOI and at least one first selection marker; b) introducing into the cell provided in a) a vector comprising three RRSs, wherein the first RRS of the vector matches the first RRS on the integrated exogenous nucleotide sequence, the second RRS of the vector matches the second RRS on the integrated exogenous nucleotide sequence, and at least one second selection marker located between the first and the second RRS; c) introducing a recombinase, wherein the recombinase recognizes the first and the second RRS on both the vector and the integrated exogenous nucleotide sequence; and d) selecting for TI host cells expressing the second selection marker to thereby isolate a TI host cell suitable for subsequent targeted integration.

### 5.2 Methods for Targeted Modification of a Host Cell Using Homologous Recombination, HDR, or NHEJ

[0340] In certain embodiments, the present disclosure provides methods for preparing TI host cells to express a polypeptide of interest comprising: a) providing a TI host cell comprising a locus of the genome of the host cell, wherein the locus is at least about 90% homologous to SEQ ID Nos. 1-7; b) introducing a vector into the TI host cell, wherein the vector comprises nucleotide sequences at least 50% homologous to a sequence selected from SEQ ID No. 1-7 flanking a DNA cassette, wherein the DNA cassette comprises at least one selection marker and at least one exogenous SOI; c) selecting for the selection marker to isolate a TI host cell with the SOI integrated in the locus of the genome, and expressing the polypeptide of interest. In certain embodiments, the DNA cassette of the vector further comprises at least one selection marker and at least one exogenous SOI flanked by two RRSs.

[0341] In certain embodiments, the present disclosure provides methods for preparing TI host cells to express a polypeptide of interest comprising g: a) providing a TI host cell comprising a locus of the genome of the host cell, wherein the locus is at least about 90% homologous to a sequence selected from SEQ ID Nos. 1-7; b) introducing a polynucleotide into the host cell, wherein the polynucleotide comprises nucleotide sequences at least 50% homologous to a sequence selected from SEQ ID No. 1-7 flanking a DNA cassette, wherein the DNA cassette comprises at least one selection marker and at least one exogenous SOI; c) selecting for the selection marker to isolate a TI host cell with the SOI integrated in the locus of the genome, and expressing the polypeptide of interest. In certain embodiments, the DNA cassette of the vector further comprises at least one selection marker and at least one exogenous SOI flanked by two RRSs.

[0342] In certain embodiments, the homologous recombination is facilitated by an integrating vector. In certain embodiments, a vector is selected from the group consisting of an adenovirus vector, an adeno-associated virus vector, a lentivirus vector, a retrovirus vector, an integrating phage vector, a non-viral vector, a transposon and/or transposase vector, an integrase substrate, and a plasmid. In certain embodiments, the transposon can be a piggyBac (PB) transposon system.

[0343] In certain embodiments, the integration is promoted by an exogenous nuclease. In certain embodiments, the exogenous nuclease is selected from the group consisting of a zinc finger nuclease (ZFN), a ZFN dimer, a transcription activator-like effector nuclease (TALEN), a TAL effector domain fusion protein, an RNA-guided DNA endonuclease, an engineered meganuclease, and a clustered regularly interspaced short palindromic repeats (CRISPR)-associated (Cas) endonuclease.

[0344] In certain embodiments, the present disclosure provides methods for preparing TI host cells suitable for subsequent targeted integration comprising: a) providing a TI host cell comprising a locus of the genome of the host cell, wherein the locus is at least about 90% homologous to a sequence comprising all or a portion of the contig sequence of one of the contigs NW_006874047.1, NW_006884592.1, NW_006881296.1, NW_003616412.1, NW_003615063.1, NW_006882936.1, and NW_003615411.1 or to a sequence selected from SEQ ID Nos. 1-7; b) introducing a vector into the TI host cell, wherein the vector comprises nucleotide sequences at least 50% homologous to a sequence comprising all or a portion of the contig sequence of one of the contigs NW_006874047.1, NW_006884592.1, NW_006881296.1, NW_003616412.1, NW_003615063.1, NW_006882936.1, and NW_003615411.1 or to a sequences selected from SEQ ID Nos. 1-7 flanking a DNA cassette, wherein the DNA cassette comprises at least one selection marker flanked by two RRSs; c) selecting for the selection marker to isolate a TI host cell suitable for subsequent targeted integration.

[0345] In certain embodiments, the present disclosure provides methods for preparing TI host cells suitable for subsequent targeted integration comprising: a) providing a TI host cell comprising a locus of the genome of the host cell, wherein the locus is at least about 90% homologous to a sequence comprising all or a portion of the contig sequence of one of the contigs NW_006874047.1, NW_006884592.1, NW_006881296.1, NW_003616412.1, NW_003615063.1, NW_006882936.1, and NW_003615411.1 or to a sequence selected from SEQ ID Nos. 1-7; b) introducing a polynucleotide into the TI host cell, wherein the polynucleotide comprises nucleotide sequences at least 50% homologous to a sequence comprising all or a portion of the contig sequence of one of the contigs NW_006874047.1, NW_006884592.1, NW_006881296.1, NW_003616412.1, NW_003615063.1, NW_006882936.1, and NW_003615411.1 or to a sequence selected from SEQ ID Nos. 1-7 flanking a DNA cassette, wherein the DNA cassette comprises at least one selection marker flanked by two RRSs; c) selecting for the selection marker to isolate a TI host cell suitable for subsequent targeted integration.

[0346] In certain embodiments, the present disclosure provides methods for preparing TI host cells suitable for subsequent targeted integration comprising: a) providing a TI host cell comprising a locus of the genome of the host cell, wherein the locus is at least about 90% homologous to a sequence comprising all or a portion of the contig sequence of one of the contigs NW_006874047.1, NW_006884592.1, NW_006881296.1, NW_003616412.1, NW_003615063.1, NW_006882936.1, and NW_003615411.1 or to a sequence selected from SEQ ID Nos. 1-7; b) introducing a vector into the host cell, wherein the vector comprises nucleotide sequences at least 50% homologous to a sequence comprising all or a portion of the contig sequence of one of the contigs NW_006874047.1, NW_006884592.1, NW_006881296.1, NW_003616412.1, NW_003615063.1, NW_006882936.1, and NW_003615411.1 or to a sequence selected from SEQ ID Nos. 1-7 flanking a DNA cassette, wherein the DNA cassette comprises three RRSs, wherein the third RRS and at least one selection marker is located between the first and the second RRS; and c) selecting for the selection marker to isolate a TI host cell suitable for subsequent targeted integration.

[0347] In certain embodiments, the present disclosure provides methods for preparing TI host cells suitable for subsequent targeted integration comprising: a) providing a TI host cell comprising a locus of the genome of the host cell, wherein the locus is at least about 90% homologous to a sequence comprising all or a portion of the contig sequence of one of the contigs NW_006874047.1, NW_006884592.1, NW_006881296.1, NW_003616412.1, NW_003615063.1, NW_006882936.1, and NW_003615411.1 or to a sequence selected from SEQ ID Nos. 1-7; b) introducing a polynucleotide into the host cell, wherein the polynucleotide comprises nucleotide sequences at least 50% homologous to a sequence comprising all or a portion of the contig sequence of one of the contigs NW_006874047.1, NW_006884592.1, NW_006881296.1, NW_003616412.1, NW_003615063.1, NW_006882936.1, and NW_003615411.1 or to a sequence selected from SEQ ID Nos. 1-7 flanking a DNA cassette, wherein the DNA cassette comprises three RRSs, wherein the third RRS and at least one selection marker is located between the first and the second RRS; and c) selecting for the selection marker to isolate a TI host cell suitable for subsequent targeted integration.

[0348] In certain embodiments, the present disclosure provides methods for preparing a TI host cell expressing at least one polypeptide of interest comprising: a) providing a TI host cell comprising at least one exogenous nucleotide sequence integrated at a site within one or more loci of the genome of the TI host cell, wherein the one or more loci are at least about 90% homologous to a sequence comprising all or a portion of the contig sequence of one of the contigs NW_006874047.1, NW_006884592.1, NW_006881296.1, NW_003616412.1, NW_003615063.1, NW_006882936.1, and NW_003615411.1 or to a sequence selected from SEQ ID Nos. 1-7, wherein the at least one exogenous nucleotide sequence comprises two RRSs, flanking at least one first selection marker; b) introducing into the cell provided in a) a vector comprising two RRSs matching the two RRSs on the integrated exogenous nucleotide sequence and flanking at least one exogenous SOI and at least one second selection marker; c) introducing a recombinase or a nucleic acid encoding a recombinase, wherein the recombinase recognizes the RRSs; and selecting for TI cells expressing the second selection marker to thereby isolate a TI host cell expressing the at least one polypeptide of interest.

[0349] In certain embodiments, the present disclosure provides methods for preparing a TI host cell expressing at least one first and second polypeptide of interest (where the first and second polypeptides can be the same or different) comprising: a) providing a TI host cell comprising at least one exogenous nucleotide sequence integrated at a site within one or more loci of the genome of the host cell, wherein one or more loci are at least about 90% homologous to a sequence comprising all or a portion of the contig sequence of one of the contigs NW_006874047.1, NW_006884592.1, NW_006881296.1, NW_003616412.1, NW_003615063.1, NW_006882936.1, and NW_003615411.1 or to a sequence selected from SEQ ID Nos. 1-7, wherein the exogenous nucleotide sequence comprises a first and a second RRS flanking at least one first selection marker, and a third RRS located between the first and the second RRS, and all the RRSs are heterospecific; b) introducing into the cell provided in a) a first vector comprising two RRSs matching the first and the third RRS on the at least one integrated exogenous nucleotide sequence and flanking at least one first exogenous SOI and at least one second selection marker; c) introducing into the cell provided in a) a second vector comprising two RRSs matching the second and the third RRS on the at least one integrated exogenous nucleotide sequence and flanking at least one second exogenous SOI; d) introducing one or more recombinases, or one or more nucleic acids encoding one or more recombinases, wherein the one or more recombinases recognize the RRSs; and e) selecting for TI cells expressing the second selection marker to thereby isolate a TI host cell expressing the at least one first and second polypeptides of interest. In certain embodiments, rather than have the entire selection maker on the first vector, the first vector comprises a promoter sequence operably linked to the codon ATG positioned flanked upstream by the first SOI and downstream by an RRS; and the second vector comprises a selection marker lacking an ATG transcription start codon flanked upstream by an RRS and downstream by the second SOI.

[0350] In certain embodiments, the present disclosure provides methods for preparing a TI host cell expressing a polypeptide of interest comprising: a) providing a TI host cell comprising at least one exogenous nucleotide sequence integrated at a site within one or more loci of the genome of the TI host cell, wherein the one or more loci are at least about 90% homologous to a sequence comprising all or a portion of the contig sequence of one of the contigs NW_006874047.1, NW_006884592.1, NW_006881296.1, NW_003616412.1, NW_003615063.1, NW_006882936.1, and NW_003615411.1 or to a sequence selected from SEQ ID Nos. 1-7, wherein the exogenous nucleotide sequence comprises one or more RRSs; b) introducing into the cell provided in a) a vector comprising one or more RRSs matching the one or more RRSs on the integrated exogenous nucleotide sequence and flanking at least one exogenous SOI operably linked to a regulatable promoter; c) introducing a recombinase or a nucleic acid encoding a recombinase, wherein the recombinase recognizes the RRSs; and d) selecting for TI cells expressing the exogenous SOI in the presence of an inducer to thereby isolate a TI host cell expressing the polypeptide of interest.

[0351] In certain embodiments, the present disclosure provides methods for expressing a polypeptide of interest comprising: a) providing a host cell comprising at least one exogenous SOI flanked by two RRSs and a regulatable promoter integrated within a locus of the genome of the host cell, wherein the locus is at least about 90% homologous to a sequence comprising all or a portion of the contig sequence of one of the contigs NW_006874047.1, NW_006884592.1, NW_006881296.1, NW_003616412.1, NW_003615063.1, NW_006882936.1, and NW_003615411.1 or to a sequence selected from SEQ ID Nos. 1-7; and b) culturing the cell under conditions suitable for expressing the SOI and recovering a polypeptide of interest therefrom.

[0352] In certain embodiments, the present disclosure provides methods for preparing a TI host cell expressing a first and second polypeptide of interest (where the first and second polypeptides can be the same or different) comprising: a) providing a TI host cell comprising an exogenous nucleotide sequence integrated at a site within a locus of the genome of the host cell, wherein the locus is at least about 90% homologous to a sequence comprising all or a portion of the contig sequence of one of the contigs NW_006874047.1, NW_006884592.1, NW_006881296.1, NW_003616412.1, NW_003615063.1, NW_006882936.1, and NW_003615411.1 or to a sequence selected from SEQ ID Nos. 1-7, wherein the exogenous nucleotide sequence comprises a first, second RRS and a third RRS located between the first and the second RRS, and all the RRSs are heterospecific; b) introducing into the cell provided in a) a first vector comprising two RRSs matching the first and the third RRS on the integrated exogenous nucleotide sequence and flanking at least one first exogenous SOI operably linked to a regulatable promoter; c) introducing into the cell provided in a) a second vector comprising two RRSs matching the second and the third RRS on the integrated exogenous nucleotide sequence and flanking at least one second SOI operably linked to a regulatable promoter; d) introducing one or more recombinases, or one or more nucleic acids encoding one or more recombinases, wherein the one or more recombinases recognize the RRSs; and e) selecting for TI cells expressing the at least first and second exogenous SOIs in the presence of an inducer to thereby isolate a TI host cell expressing the polypeptides of interest. In certain embodiments, rather than have the entire selection maker on the first vector, the first vector comprises a promoter sequence operably linked to the codon ATG positioned flanked upstream by the first SOI and downstream by an RRS; and the second vector comprises a selection marker lacking an ATG transcription start codon flanked upstream by an RRS and downstream by the second SOI.

### 6. Products

[0353] The RVLP-reduced CHO host cells of the present disclosure can be used for the expression of any molecule of interest, e.g., a polypeptide of interest. In certain embodiments, the host cells of the present disclosure can be used for the expression of polypeptides, e.g., mammalian polypeptides. Non-limiting examples of such polypeptides include hormones, receptors, fusion proteins, regulatory factors, growth factors, complement system factors, enzymes, clotting factors, anti-clotting factors, kinases, cytokines, CD proteins, interleukins, therapeutic proteins, diagnostic proteins and antibodies. In some embodiments, the antibody is a monoclonal antibody. In some embodiments, the antibody is a therapeutic antibody. In some embodiments, the antibody is a diagnostic antibody. In some embodiments, the antibody is a human antibody. In some embodiments, the antibody is a humanized antibody.

[0354] In certain embodiments, the polypeptide of interest is a bi-specific, tri-specific or multispecific polypeptide, e.g., a bi-specific antibody. Various molecular formats for multispecific antibodies are known in the art and are included herein (see e.g., Spiess et al., Mol Immunol 67 (2015) 95-106). A particular type of multispecific antibodies, also included herein, are bispecific antibodies designed to simultaneously bind to a surface antigen on a target cell, e.g., a tumor cell, and to an activating, invariant component of the T cell receptor (TCR) complex, such as CD3, for retargeting of T cells to kill target cells. Other examples of bispecific antibody formats include, but are not limited to, the so-called “BiTE” (bispecific T cell engager) molecules wherein two scFv molecules are fused by a flexible linker (see, e.g., WO 2004/106381, WO 2005/061547, WO 2007/042261, and WO 2008/119567, Nagorsen and Bauerle, Exp Cell Res 317, 1255-1260 (2011)); diabodies (Holliger et al., Prot Eng 9, 299-305 (1996)) and derivatives thereof, such as tandem diabodies (“TandAb”; Kipriyanov et al., J Mol Biol 293, 41-56 (1999)); “DART” (dual affinity retargeting) molecules which are based on the diabody format but feature a C-terminal disulfide bridge for additional stabilization (Johnson et al., J Mol Biol 399, 436-449 (2010)), and so-called triomabs, which are whole hybrid mouse/rat IgG molecules (reviewed in Seimetz et al., Cancer Treat Rev 36, 458-467 (2010)). Particular T cell bispecific antibody formats included herein are described in WO 2013/026833, WO 2013/026839, WO 2016/020309; Bacac et al., Oncoimmunology 5(8) (2016) e1203498.

[0355] Therapeutic antibodies include, without limitation, anti-HER receptor family antibodies (such as anti-HER1 (EGFR), anti-HER2, anti-HER3 and anti-HER4); anti-CD protein antibodies (such as anti-CD3, anti-CD4, anti-CD8, anti-CD19, anti-CD20, anti-CD21, anti-CD22, anti-CD25, anti-CD33, anti-CD34, anti-CD38, anti-CD52); anti-IL-8 antibodies; anti-VEGF antibodies; anti-CD40 antibodies, anti-CD11a antibodies; anti-CD18 antibodies; anti-IgE antibodies; anti-Apo-2 receptor antibodies; anti-Tissue Factor (TF) antibodies; anti-cell adhesion molecules such as LFA-1, Mol, p150,95, VLA-4, ICAM-1, VCAM, anti-human α₄β₇ integrin antibodies, anti-human αᵥβ₈ integrin antibodies, anti-αvβ3 antibodies including either α or ρ or subunits thereof (e.g. anti-CD11a, anti-CD18 or anti-CD11b antibodies); anti-EGFR antibodies; anti-Fc receptor antibodies; anti-carcinoembryonic antigen (CEA) antibodies; anti-human renal cell carcinoma antibodies; anti-human colorectal tumor antibodies; anti-human melanoma antibody R24 directed against GD3 ganglioside; anti-human squamous-cell carcinoma; antibodies directed against breast epithelial cells; antibodies that bind to colon carcinoma cells; anti-EpCAM antibodies; anti-GpIIb/IIIa antibodies; anti-RSV antibodies; anti-CMV antibodies; anti-HIV antibodies; anti-hepatitis antibodies; anti-CA 125 antibodies; anti-human 17-1A antibodies; and anti-human leukocyte antigen (HLA) antibodies, and anti-HLA DR antibodies; anti-growth factors such as vascular endothelial growth factor (anti-VEGF) or fragments; anti-IgE; anti-blood group antigens; anti-flk2/flt3 receptor; and anti-obesity (OB) receptor. Other exemplary proteins to which therapeutic antibodies are designed include anti-amyloid antibodies, anti-alpha-synuclein (e.g.: prasinezumab), anti-amyloid-beta, anti-growth hormone (GH), including human growth hormone (hGH) and bovine growth hormone (bGH); growth hormone releasing factor; parathyroid hormone; thyroid stimulating hormone; lipoproteins; α-1-antitrypsin; insulin A-chain; insulin B-chain; proinsulin; follicle stimulating hormone; calcitonin; luteinizing hormone; glucagon; clotting factors such as factor VIIIC, tissue factor or von Willebrands factor; anti-clotting factors such as Protein C; atrial natriuretic factor; lung surfactant; a plasminogen activator, such as urokinase or tissue-type plasminogen activator (t-PA); bombazine; thrombin; tumor necrosis factor-α and -β; enkephalinase; RANTES (regulated on activation normally T-cell expressed and secreted); human macrophage inflammatory protein (MIP-1-α); serum albumin such as human serum albumin (HSA); mullerian-inhibiting substance; relaxin A-chain; relaxin B-chain; prorelaxin; mouse gonadotropin-associated peptide; DNase; inhibin; activin; receptors for hormones or growth factors; protein A or D; rheumatoid factors; a neurotrophic factor such as bone-derived neurotrophic factor (BDNF), neurotrophin-3, -4, -5, or -6 (NT-3, NT-4, NT-5, or NT-6), or a nerve growth factor such as NGF-β; platelet-derived growth factor (PDGF); fibroblast growth factor such as aFGF and bFGF; epidermal growth factor (EGF); transforming growth factor (TGF) such as TGF-α and TGF-β, including TGF-β1, TGF-β2, TGF-β3, TGF-β4, or TGF-β5; insulin-like growth factor-I and -II (IGF-I and IGF-II); des(1-3)-IGF-I (brain IGF-I); insulin-like growth factor binding proteins (IGFBPs); erythropoietin (EPO); thrombopoietin (TPO); osteoinductive factors; immunotoxins; a bone morphogenetic protein (BMP); an interferon such as interferon−α, -β, and -γ; colony stimulating factors (CSFs), e.g., M-CSF, GM-CSF, and G-CSF; interleukins (ILs), e.g., IL-1 to IL-10; superoxide dismutase; T-cell receptors; surface membrane proteins; decay accelerating factor (DAF); a viral antigen such as, for example, a portion of the AIDS envelope; transport proteins; homing receptors; addressins; regulatory proteins; immunoadhesins; and biologically active fragments or variants of any of the above-listed polypeptides. Many other antibodies and/or other proteins may be used in accordance with the instant invention, and the above lists are not meant to be limiting.

[0356] Therapeutic antibodies of particular interest include those in clinical practice or in development, such as commercially available AVASTIN® (bevacizumab), HERCEPTIN® (trastuzumab), LUCENTIS® (ranibizumab), RAPTIVA® (efalizumab), RITUXAN® (rituximab), and XOLAIR® (omalizumab), anti-amyloid beta (Abeta), anti-CD4 (MTRX1011A), anti-EGFL7 (EGF-like-domain 7), anti-IL13, Apomab (anti-DR5-targeted pro-apoptotic receptor agonist (PARA), anti-BR3 (CD268, anti-BLyS receptor 3, anti-BAFF-R, (BAFF Receptor), anti-beta 7 integrin subunit, anti-αᵥβ₈ integrin antibodies, dacetuzumab (Anti-CD40), GA101 (anti-CD20 monoclonal antibody), MetMAb (anti-MET receptor tyrosine kinase), anti-neuropilin-1 (NRP1), OCREVUS® (ocrelizumab—anti-CD20 antibody), anti-OX40 ligand, anti-oxidized LDL (oxLDL), PERJETA® (pertuzumab—HER dimerization inhibitors (HDIs)), TECENTRIQ® (anti-PD-L1 antibody), anti-CD79b antibody, LUNSUMIO® or COLUMVI™ (anti-CD20×anti-CD3 bispecific antibody), VABYSMO® (anti-VEGF-A×anti-angiopoietin-2 bispecific antibody), rhuMAb IFN alpha, etc. Many other antibodies and/or other proteins may be used in accordance with the instant invention, and the above lists are not meant to be limiting.

[0357] The host cells of the present disclosure may be employed in the production of a molecule of interest at manufacturing scale. “Manufacturing scale” production of therapeutic proteins, or other proteins, utilize cell cultures ranging from about 400 L to about 80,000 L, depending on the protein being produced and the need. Typically, such manufacturing scale production utilizes cell culture sizes from about 400 L to about 25,000 L. Within this range, specific cell culture sizes such as 4,000 L, about 6,000 L, about 8,000, about 10,000, about 12,000 L, about 14,000 L, or about 16,000 L may be utilized.

[0358] The host cells of the present disclosure can be employed in the production of large quantities of a molecule of interest in a shorter timeframe as compared to non-TI cells used in current cell culture methods. In certain embodiments, the host cells of the present disclosure can be employed for improved quality of the molecule of interest as compared to non-TI cells used in current cell culture methods. In certain embodiments, the host cells of the present disclosure can be used to enhance seed train stability by preventing chronic toxicity that can be caused by products that can cause cell stress and clonal instability over time. In certain embodiments, the host cells of the present disclosure can be used for the optimal expression of acutely toxic products.

[0359] In certain embodiments, the host cells, the TI systems of the present disclosure, can be used for cell culture process optimization and/or process development.

[0360] In certain embodiments, the host cells of the present disclosure can be used to accelerate the production of a molecule of interest by about 1 week, about, 2 weeks, about 3 weeks, about 4 weeks, about 5 weeks, about 6 weeks, about 7 weeks, about 8 weeks, about 9 weeks, or about 10 weeks as compared to non-TI cells used in conventional cell culture methods. In certain embodiments, the host cells of the present disclosure can be used to accelerate the harvest of a molecule of interest by about 1 week, about, 2 weeks, about 3 weeks, about 4 weeks, about 5 weeks, about 6 weeks, about 7 weeks, about 8 weeks, about 9 weeks, or about 10 weeks as compared to non-TI cells used in conventional cell culture methods.

[0361] In certain embodiments, the host cells of the present embodiment can be employed to reduce aggregate levels of a molecule of interest as compared to non-TI cells used in conventional cell culture methods.

[0362] In certain embodiments, the host cells of the present disclosure can be used to achieve increased expression of a polypeptide (or polypeptides) of interest relative to a host cell where the exogenous sequence expressing the polypeptide (or polypeptides) of interest is randomly integrated. For example, but not by way of limitation, the host cells of the present disclosure can achieve expression of standard and half antibodies at titers of at least 3 g/L, 3.5 g/L, 4 g/L, 4.5 g/L, 5 g/L, 5.5 g/L, 6 g/L, 6.5 g/L, 7 g/L, 7.5 g/L, 8 g/L, 8.5 g/L, 9 g/L, 9.5 g/L, 10 g/L, 10.5 g/L, 11 g/L, or more, and expression of multispecific antibodies, e.g., bispecific antibodies, of at least 1.5 g/L, 2 g/L, 2.5 g/L, 3 g/L, 3.5 g/L, 4 g/L, 4.5 g/L, 5 g/L, 5.5 g/L, 6 g/L, or more. In certain embodiments, the host cells of the present disclosure can achieve increased bispecific content relative to a host cell where the exogenous sequence(s) expressing the bispecific content is randomly integrated. For example, but not by way of limitation the host cells of the present disclosure can achieve bispecific content of at least 80%, 85%, 90%, 95%, 96%, 98%, 99% or more.

[0363] In certain embodiments, the host cells of the present disclosure can be used as an investigational tool. In certain embodiments, the host cells of the present disclosure can be used as a diagnostic tool to map out the root causes of low protein expression for problematic molecules in various cells. In certain embodiments, the host cells of the present disclosure can be used to directly link an observed phenomenon or cellular behavior to the transgene expression in the cells. The host cell of the present disclosure can also be used to demonstrate whether or not an observed behavior is reversible in the cells. In certain embodiments, the host cells of the present disclosure can be exploited to identify and mitigate problems with respect to transgene(s) transcription and expression in cells.

### 7. Examples

### 7.1 Inactivation of ERV Genes: RVLP Titer & Integral Viable Cell Concentration

[0364] CRISPR Reagents. Guide RNAs targeting the Gag genes of CHERV-3g and CHERV-1b for indel (ID) knockout were designed using CRISPOR software (Concordet J P, Haeussler M. CRISPOR: intuitive guide selection for CRISPR/Cas9 genome editing experiments and screens. Nucleic Acids Res. 2018 Jul. 2; 46(W1):W242-W245. doi: 10.1093/nar/gky354). Guide RNAs targeting the Gag genes of CHERV-3g and CHERV-1b for base edit (BE) knockout were designed using BE-Designer software (Hwang, G H., Park, J., Lim, K. et al. Web-based design and analysis tools for CRISPR base editing. BMC Bioinformatics 19, 542 (2018). https://doi.org/10.1186/s12859-018-2585-4). All ID guide RNAs were chemically synthesized by Integrated DNA Technologies, Inc.

[0365] Guide RNAs targeting the genomic flanking regions of CHERV-3g and CHERV-1b for deletion (DL) knockout were designed using CRISPOR software (Concordet J P, Haeussler M. CRISPOR: intuitive guide selection for CRISPR/Cas9 genome editing experiments and screens. Nucleic Acids Res. 2018 Jul. 2; 46(W1):W242-W245. doi: 10.1093/nar/gky354). All DL guide RNAs were chemically synthesized by Integrated DNA Technologies, Inc.

[0366] Cas9 nuclease was purchased from Integrated DNA Technologies, Inc., and a plasmid for the expression of AncBE4max (Koblan, L., Doman, J., Wilson, C. et al. Improving cytidine and adenine base editors by expression optimization and ancestral reconstruction. Nat Biotechnol 36, 843-846 (2018). https://doi.org/10.1038/nbt.4172) was chemically synthesized by Genscript Biotech.

[0367] Transfection. For the results depicted in FIG. 1A-1D, a CHO-K1-derived targeted integration host cell line, Line A, with a known deletion in the ETC109F locus was used to conduct knockouts. For indel knockouts, Cas9 protein and CHERV-3g Gag sgRNA and CHERV-1b Gag sgRNA were complexed into RNPs and electroporated into cells with a Neon Transfection system (ThermoFisher). After four days, cells were transfected again under the same conditions. For base-edit knockouts, AncBE4max plasmid and CHERV-3g Gag sgRNA and CHERV-1b Gag sgRNA were electroporated into cells with a Neon Transfection system (ThermoFisher).

[0368] With respect to the results depicted in FIG. 2B-2C, A CHO-K1-derived targeted integration host cell line, “host control”, with a known deletion in the ETC109F locus was used to conduct knockouts. For deletion knockouts, Cas9 protein and CHERV-3g 5′ Flanking sgRNA, CHERV-3g 3′ Flanking sgRNA, CHERV-1b 5′ Flanking sgRNA and CHERV-1b 3′ Flanking sgRNA were complexed into RNPs and electroporated into cells with a Neon Transfection system (ThermoFisher). After two days, cells were transfected again under the same conditions.

[0369] Single Cell Cloning. For the results depicted in FIG. 1A-1D, knockout pools were subjected to single cell cloning into 384-well plates by limiting dilution (0.4 cells/well). Confluent wells on day 14 were scaled up to 96-well plates. Supernatant of cultures were treated with Turbo DNase (ThermoFisher) and CHERV-3g, CHERV-1b, and Actb titers were quantified by One-Step RT-ddPCR Advanced Kit for Probes (Bio-Rad). Clones with lowest CHERV-3g+CHERV-1b titers (relative to Actb) were expanded, along with control clones without CHERV-3g KO, CHERV-1b KO, or both CHERV-3g and CHERV-1b KO.

[0370] For the results depicted in FIG. 2B-2C, knockout pools were subjected to single cell cloning into 384-well plates using an UP.SIGHT single cell dispenser (Cytena). Confluent wells on day 14 were scaled up to 96-well plates. Clones were screened for large deletions in CHERV-3g and CHERV-1b loci by genomic PCR. Additionally, supernatant of cultures were treated with Turbo DNase (ThermoFisher) and CHERV-3g, CHERV-1b, and Actb titers were quantified by One-Step RT-ddPCR Advanced Kit for Probes (Bio-Rad). Clones with genotypes of interest were expanded and assessed by production culture.

[0371] Production Culture. RVLP KO clones were cultured in a 7-day fed-batch culture in shake flasks using chemically-defined medium and feeds. Cell counts were periodically taken to calculate integral viable cell concentration (IVCC). Supernatant was harvested on day 7 and treated with Turbo DNase (ThermoFisher). RNA was extracted using the MagNA Pure 96 system (Roche Diagnostics). Extracted RNA was assessed for CHERV-3g, CHERV-1b, and CHERV-2g titers by One-Step RT-ddPCR Advanced Kit for Probes (Bio-Rad). Total RVLP titers were calculated by summing CHERV-3g, CHERV-1b, and CHERV-2g titers.

[0372] TEM Titration. Cell cultures were harvested by centrifugation at 250×g for 10 minutes. Supernatant was submitted to Charles River Laboratories for RVLP quantification by TEM analysis. In brief, 40 mL of supernatant was ultracentrifuged and pellets were fixed in 2% glutaraldehyde and 0.1 M sodium cacodylate. Thin sections of the pellet were cut at 70-90 nm and mounted on 200 mesh copper grids, stained with methanolic uranyl acetate and Reynold's lead citrate, and examined by TEM. Trained technicians identified and counted ten grid spaces for particles with retrovirus-like morphology. RVLP titers were calculated based on grid section volume, pellet volume, and sample volume.

[0373] Results. FIG. 1A depicts the distribution of expression of three ERV species in RVLP Gag knockout clones and controls where ID correspond to indel knockouts and BE correspond to Base Edits as discussed above. FIG. 1B depicts the total RVLP titers (sum of three ERVs) in Gag knockout clones and controls. FIG. 1C depicts the production culture integral viable cell concentration (IVCC) in Gag knockout clones and controls. FIG. 1D indicates that Gag knockout clones produced fewer RVLPs, as assessed by TEM. In fact, in two of three knockout clones, RVLP titers were below the limit of detection of the assay.

[0374] FIG. 2A depicts genomic loci matching the CHERV-3g and CHERV-1b RVLP sequences were identified by BLAST and/or RNA-sequencing, and verified by genomic PCR and sequencing. CHERV-3g was found to exist in the CHO genome assembly (GCF_003668045.3). Two alleles of CHERV-3g were found in CHO cells with minor differences in the two alleles. CHERV-1b was found to exist as one copy and not present in the CHO genome assembly. Part of the 3′LTR of CHERV-1b is truncated and a long telomere-like repeat is present, which is also present on the suspected 3′ flanking genomic sequence of the integration site. Guide RNAs directed to the CHO genome regions flanking these two loci were designed and the four sites were targeted simultaneously with CRISPR/Cas9 to stimulate large deletions. FIGS. 2B and 2C indicate that DL-8 and DL-17 showed reduced RVLP titers by RT-ddPCR and TEM. DL-11 and DL-19 showed reduced CHERV-3g titers but high CHERV-1b titers by RT-ddPCR. Accordingly, DL-19 showed a slight reduction in TEM titer. Yet DL-11 showed a strong reduction in TEM titer.

What is claimed is:

1. A modified Chinese Hamster Ovary (CHO) cell where, prior to the modification, the CHO cell comprises two or more endogenous retrovirus (ERV) loci selected from:
(a) CHERV-1b (Genbank Accession No. MN527960, SEQ ID NO. 8);
(b) CHERV-2g (Genbank Accession No. MN527961, SEQ ID NO. 9);
(c) ETC109F (30021-39247 of SEQ ID NO. 10);
(d) CHERV-3g (Genbank Accession No. MN527962, SEQ ID NO. 11); and
(e) an ERV locus comprising a sequence having at least 90% identity to any one of (a)-(d), and where the modification comprises inactivation of two or more of the ERV loci of (a)-(e).

2. The modified CHO cell of claim 1, wherein inactivation of the ERV loci comprises a knock-out of the respective ERV GAG coding sequence.

3. The modified CHO cell of claim 2, wherein the knock-out of each respective ERV GAG coding sequence comprises introduction of an indel into the ERV GAG coding sequence.

4. The modified CHO cell of claim 2, wherein the knock-out of each respective ERV GAG coding sequence comprises introduction of a base edit into the ERV GAG coding sequence.

5. The modified CHO cell of claim 2, wherein the knock-out of each respective ERV GAG coding sequence comprises introduction of a deletion flanking the ERV GAG coding sequence.

6. The modified CHO cell of claim 1, wherein the inactivation of one or more of the ERV loci comprises deletion of at least one ERV locus.

7. The modified CHO cell of claim 6, wherein the inactivation of one or more of the ERV loci comprises deletion of each ERV locus.

8. The modified CHO cell of claim 6, wherein the inactivation of one or more of the ERV loci comprises deletion of an ERV locus and introduction of an indel or a base edit into the ERV GAG coding sequence of an ERV locus.

9. The modified CHO cell of any one of claims 1-8, wherein the modified cell expresses a recombinant product of interest.

10. The modified CHO cell of any one of claims 1-8, wherein the modified cell is generated from a recombinant cell that expresses a recombinant product of interest.

11. The modified CHO cell of claim 9 or 10, wherein the recombinant product of interest comprises a recombinant protein.

12. The modified CHO cell of claim 11, wherein the recombinant protein is antibody or an antigen-binding fragment thereof.

13. The modified CHO cell of claim 12, wherein the antibody is a multispecific antibody or an antigen-binding fragment thereof.

14. The modified CHO cell of claim 13, wherein the antibody consists of a single heavy chain sequence and a single light chain sequence or antigen-binding fragments thereof.

15. The modified CHO cell of any one of claims 12-14, wherein the antibody is a chimeric antibody, a human antibody or a humanized antibody.

16. The modified CHO cell of any one of claims 12-15, wherein the antibody is a monoclonal antibody.

17. The modified CHO cell of claim 12, wherein the antibody is selected from: bevacizumab; trastuzumab; ranibizumab; efalizumab; rituximab, omalizumab, an anti-amyloid beta (Abeta) antibody; an anti-CD4 (MTRX1011A) antibody; an anti-EGFL7 (EGF-like-domain 7) antibody; an anti-IL13 antibody; an anti-Apomab antibody; an anti-DR5-targeted pro-apoptotic receptor agonist (PARA) antibody; an anti-BR3 antibody; an anti-CD268 antibody; an anti-BLyS receptor 3 antibody; an anti-BAFF-R (BAFF Receptor) antibody; an anti-beta 7 integrin subunit antibody; an anti-αᵥβ₈ integrin antibody; dacetuzumab (Anti-CD40); GA101 (anti-CD20 monoclonal antibody); MetMAb (anti-MET receptor tyrosine kinase antibody); an anti-neuropilin-1 (NRP1) antibody; ocrelizumab (anti-CD20 antibody); an anti-OX40 ligand antibody; an anti-oxidized LDL (oxLDL) antibody; pertuzumab (HER dimerization inhibitors (HDIs)); an anti-PD-L1 antibody; an anti-CD79b antibody; an anti-CD20×anti-CD3 bispecific antibody; an anti-VEGF-A×anti-angiopoietin-2 bispecific antibody; and rhuMAb IFN alpha.

18. The modified CHO cell of claim 10 or 11, wherein the recombinant product of interest is encoded by an exogenous nucleic acid sequence integrated in the cellular genome of the CHO cell at one or more targeted locations.

19. The modified CHO cell of claim 18, wherein the targeted location is at least about 90% homologous to a sequence of a portion of the contig sequence of one of the contigs NW_006874047.1, NW_006884592.1, NW_006881296.1, NW_003616412.1, NW_003615063.1, NW_006882936.1, and NW_003615411.1, or to a sequence selected from SEQ ID Nos. 1-7.

20. The modified CHO cell of claim 18, wherein the targeted location is within a sequence at least about 50% homologous to a 1000 nucleotide sequence: of NW_006874047.1 comprising position 45269; of NW_006884592.1 comprising position 207911; of NW_006881296.1 comprising position 491909; of NW_003616412.1 comprising position 79768; of NW_003615063.1 comprising position 315265; of NW_006882936.1 comprising position 2662054; or of NW_003615411.1 comprising position 97705.

21. The modified CHO cell of claim 19 or 20, wherein the modified CHO cell comprises gene knock-outs selected from: a) BAX; BAK; ICAM-1; GGTA1; CMAH; LPL; LPLA2; and PPT1; b) BAX; BAK; ICAM-1; SIRT-1; GGTA1; CMAH; LPL, LPLA2; and PPT1; c) BAX; BAK; ICAM-1; SIRT-1; MYC; GGTA1; CMAH; LPL; LPLA2; and PPT1; d) BAX; BAK; ICAM-1; SIRT-1; MYC; GGTA1; CMAH; LPL, LPLA2; PPT1; and LIPA; e) BAX; BAK; ICAM-1; GGTA1; CMAH; LPLA2; PPT1; and LIPA; f) BAX; BAK; ICAM-1; SIRT-1; GGTA1; CMAH; LPLA2; PPT1; and LIPA; g) BAX; BAK; ICAM-1; SIRT-1; MYC; GGTA1; CMAH; LPLA2; PPT1; and LIPA; h) BAX; BAK; ICAM-1; LPL; LPLA2; and PPT1; i) BAX; BAK; ICAM-1; SIRT-1; LPL, LPLA2; and PPT1; j) BAX; BAK; ICAM-1; SIRT-1; MYC; LPL; LPLA2; and PPT1; k) BAX; BAK; ICAM-1; SIRT-1; MYC; LPL; LPLA2; PPT1; and LIPA; 1) BAX; BAK; ICAM-1; SIRT-1; and MYC; m) BAX; BAK; ICAM-1; PERK; SIRT-1; and MYC; n) BAX; BAK; ICAM-1; SIRT-1; PERK; MYC; GGTA1; CMAH; LPL, LPLA2; PPT1; and LIPA; o) BAX; BAK; LPL; LPLA2; GGTA1; and CMAH; p) BAX; BAK; PERK; LPL; LPLA2; GGTA1; and CMAH; q) BAX; BAK; MYC; LPL; LPLA2; GGTA1; and CMAH; r) BAX; BAK; MYC; PERK; LPL; LPLA2; GGTA1; and CMAH; s) BAX; BAK; LPL; LPLA2; GGTA1; CMAH; and PPT1; t) BAX; BAK; PERK; LPL; LPLA2; GGTA1; CMAH; and PPT1; u) BAX; BAK; MYC; LPL; LPLA2; GGTA1; CMAH; and PPT1; v) BAX; BAK; MYC; PERK; LPL; LPLA2; GGTA1; CMAH; and PPT1; w) BAX; BAK; ICAM-1; and SIRT-1; x) BAX; BAK; and ICAM-1; y) BAX; BAK; BCKDHA; ICAM-1; GGTA1; CMAH; LPL; LPLA2; and PPT1; z) BAX; BAK; BCKDHA; ICAM-1; SIRT-1; GGTA1; CMAH; LPL; LPLA2; and PPT1; aa) BAX; BAK; BCKDHA; ICAM-1; SIRT-1; MYC; GGTA1; CMAH; LPL; LPLA2; and PPT1; bb) BAX; BAK; BCKDHA; ICAM-1; SIRT-1; MYC; GGTA1; CMAH; LPL, LPLA2; PPT1; and LIPA; cc) BAX; BAK; BCKDHA; ICAM-1; GGTA1; CMAH; LPLA2; PPT1; and LIPA; dd) BAX; BAK; BCKDHA; ICAM-1; SIRT-1; GGTA1; CMAH; LPLA2; PPT1; and LIPA; ee) BAX; BAK; BCKDHA; ICAM-1; SIRT-1; MYC; GGTA1; CMAH; LPLA2; PPT1; and LIPA; ff) BAX; BAK; BCKDHA; ICAM-1; LPL; LPLA2; and PPT1; gg) BAX; BAK; BCKDHA; ICAM-1; SIRT-1; LPL, LPLA2; and PPT1; hh) BAX; BAK; BCKDHA; ICAM-1; SIRT-1; MYC; LPL; LPLA2; and PPT1; ii) BAX; BAK; BCKDHA; ICAM-1; SIRT-1; MYC; LPL; LPLA2; PPT1; and LIPA; jj) BAX; BAK; BCKDHA; ICAM-1; SIRT-1; and MYC; kk) BAX; BAK; BCKDHA; ICAM-1; PERK; SIRT-1; and MYC; 11) BAX; BAK; BCKDHA; ICAM-1; PERK; SIRT-1; MYC; GGTA1; CMAH; LPL, LPLA2; PPT1; and LIPA; mm) BAX; BAK; BCKDHA; LPL; LPLA2; GGTA1; and CMAH; nn) BAX; BAK; BCKDHA; PERK; LPL; LPLA2; GGTA1; and CMAH; oo) BAX; BAK; BCKDHA; MYC; LPL; LPLA2; GGTA1; and CMAH; pp) BAX; BAK; BCKDHA; MYC; PERK; LPL; LPLA2; GGTA1; and CMAH; qq) BAX; BAK; BCKDHA; LPL; LPLA2; GGTA1; CMAH; and PPT1; rr) BAX; BAK; BCKDHA; PERK; LPL; LPLA2; GGTA1; CMAH; and PPT1; ss) BAX; BAK; BCKDHA; MYC; LPL; LPLA2; GGTA1; CMAH; and PPT1; tt) BAX; BAK; BCKDHA; MYC; PERK; LPL; LPLA2; GGTA1; CMAH; and PPT1; uu) BAX; BAK; BCKDHA; ICAM-1; and SIRT-1; vv) BAX; BAK; BCKDHA; and ICAM-1; ww) BAX; BAK; BCKDHB; ICAM-1; GGTA1; CMAH; LPL; LPLA2; and PPT1; xx) BAX; BAK; BCKDHB; ICAM-1; SIRT-1; GGTA1; CMAH; LPL; LPLA2; and PPT1; yy) BAX; BAK; BCKDHB; ICAM-1; SIRT-1; MYC; GGTA1; CMAH; LPL; LPLA2; and PPT1; zz) BAX; BAK; BCKDHB; ICAM-1; SIRT-1; MYC; GGTA1; CMAH; LPL, LPLA2; PPT1; and LIPA; aaa) BAX; BAK; BCKDHB; ICAM-1; GGTA1; CMAH; LPLA2; PPT1; and LIPA; bbb) BAX; BAK; BCKDHB; ICAM-1; SIRT-1; GGTA1; CMAH; LPLA2; PPT1; and LIPA; ccc) BAX; BAK; BCKDHB; ICAM-1; SIRT-1; MYC; GGTA1; CMAH; LPLA2; PPT1; and LIPA; ddd) BAX; BAK; BCKDHB; ICAM-1; LPL; LPLA2; and PPT1; eee) BAX; BAK; BCKDHB; ICAM-1; SIRT-1; LPL, LPLA2; and PPT1; fff) BAX; BAK; BCKDHB; ICAM-1; SIRT-1; MYC; LPL; LPLA2; and PPT1; ggg) BAX; BAK; BCKDHB; ICAM-1; SIRT-1; MYC; LPL; LPLA2; PPT1; and LIPA; hhh) BAX; BAK; BCKDHB; ICAM-1; SIRT-1; and MYC; iii) BAX; BAK; BCKDHB; ICAM-1; PERK; SIRT-1; and MYC; jjj) BAX; BAK; BCKDHB; ICAM-1; PERK; SIRT-1; MYC; GGTA1; CMAH; LPL, LPLA2; PPT1; and LIPA; kkk) BAX; BAK; BCKDHB; LPL; LPLA2; GGTA1; and CMAH; 111) BAX; BAK; BCKDHB; PERK; LPL; LPLA2; GGTA1; and CMAH; mmm) BAX; BAK; BCKDHB; MYC; LPL; LPLA2; GGTA1; and CMAH; nnn) BAX; BAK; BCKDHB; MYC; PERK; LPL; LPLA2; GGTA1; and CMAH; ooo) BAX; BAK; BCKDHB; LPL; LPLA2; GGTA1; CMAH; and PPT1; ppp) BAX; BAK; BCKDHB; PERK; LPL; LPLA2; GGTA1; CMAH; and PPT1; qqq) BAX; BAK; BCKDHB; MYC; LPL; LPLA2; GGTA1; CMAH; and PPT1; rrr) BAX; BAK; BCKDHB; MYC; PERK; LPL; LPLA2; GGTA1; CMAH; and PPT1; sss) BAX; BAK; BCKDHB; ICAM-1; and SIRT-1; ttt) BAX; BAK; BCKDHB; and ICAM-1; uuu) BAX; BAK; BCKDHA; BCKDHB; ICAM-1; GGTA1; CMAH; LPL; LPLA2; and PPT1; vvv) BAX; BAK; BCKDHA; BCKDHB; ICAM-1; SIRT-1; GGTA1; CMAH; LPL; LPLA2; and PPT1; www) BAX; BAK; BCKDHA; BCKDHB; ICAM-1; SIRT-1; MYC; GGTA1; CMAH; LPL; LPLA2; and PPT1; xxx) BAX; BAK; BCKDHA; BCKDHB; ICAM-1; SIRT-1; MYC; GGTA1; CMAH; LPL, LPLA2; PPT1; and LIPA; yyy) BAX; BAK; BCKDHA; BCKDHB; ICAM-1; GGTA1; CMAH; LPLA2; PPT1; and LIPA; zzz) BAX; BAK; BCKDHA; BCKDHB; ICAM-1; SIRT-1; GGTA1; CMAH; LPLA2; PPT1; and LIPA; aaaa) BAX; BAK; BCKDHA; BCKDHB; ICAM-1; SIRT-1; MYC; GGTA1; CMAH; LPLA2; PPT1; and LIPA; bbbb) BAX; BAK; BCKDHA; BCKDHB; ICAM-1; LPL; LPLA2; and PPT1; cccc) BAX; BAK; BCKDHA; BCKDHB; ICAM-1; SIRT-1; LPL, LPLA2; and PPT1; dddd) BAX; BAK; BCKDHA; BCKDHB; ICAM-1; SIRT-1; MYC; LPL; LPLA2; and PPT1; eeee) BAX; BAK; BCKDHA; BCKDHB; ICAM-1; SIRT-1; MYC; LPL; LPLA2; PPT1; and LIPA; ffff) BAX; BAK; BCKDHA; BCKDHB; ICAM-1; SIRT-1; and MYC; gggg) BAX; BAK; BCKDHA; BCKDHB; ICAM-1; PERK; SIRT-1; and MYC; hhhh) BAX; BAK; BCKDHA; BCKDHB; ICAM-1; PERK; SIRT-1; MYC; GGTA1; CMAH; LPL, LPLA2; PPT1; and LIPA; iiii) BAX; BAK; BCKDHA; BCKDHB; LPL; LPLA2; GGTA1; and CMAH; jjjj) BAX; BAK; BCKDHA; BCKDHB; PERK; LPL; LPLA2; GGTA1; and CMAH; kkkk) BAX; BAK; BCKDHA; BCKDHB; MYC; LPL; LPLA2; GGTA1; and CMAH; llll) BAX; BAK; BCKDHA; BCKDHB; MYC; PERK; LPL; LPLA2; GGTA1; and CMAH; mmmm) BAX; BAK; BCKDHA; BCKDHB; LPL; LPLA2; GGTA1; CMAH; and PPT1; nnnn) BAX; BAK; BCKDHA; BCKDHB; PERK; LPL; LPLA2; GGTA1; CMAH; and PPT1; oooo) BAX; BAK; BCKDHA; BCKDHB; MYC; LPL; LPLA2; GGTA1; CMAH; and PPT1; pppp) BAX; BAK; BCKDHA; BCKDHB; MYC; PERK; LPL; LPLA2; GGTA1; CMAH; and PPT1; qqqq) BAX; BAK; BCKDHA; BCKDHB; ICAM-1; and SIRT-1; or rrrr) BAX; BAK; BCKDHA; BCKDHB; and ICAM-1.

22. A method for producing a modified CHO cell, comprising:
(a) contacting the cell with a nuclease-assisted gene targeting system and/or nucleic acid targeting at least two endogenous ERVs selected from
(i) CHERV-1b (Genbank Accession No. MN527960, SEQ ID NO. 8);
(ii) CHERV-2g (Genbank Accession No. MN527961, SEQ ID NO. 9);
(iii) ETC109F (30021-39247 of SEQ ID NO. 10);
(iv) CHERV-3g (Genbank Accession No. MN527962, SEQ ID NO. 11); and
(v) an ERV locus comprising a sequence having at least 90% identity to any one of
(i)-(iv), and
(b) selecting the modified CHO cell wherein the expression of said ERVs has been reduced or eliminated as compared to an unmodified CHO cell.

23. The method according to claim 22, wherein an exogenous nucleic acid encoding a recombinant product of interest is introduced into the CHO cell after the modification of claim 21.

24. The method according to claim 23, wherein an exogenous nucleic acid encoding a recombinant product of interest is introduced into the CHO cell prior to the modification of claim 21.

25. The method of claim 23 or claim 24, wherein the exogenous nucleic acid encoding a recombinant product of interest is integrated in the cellular genome of the modified cells at one or more targeted locations.

26. The method of claim 25, wherein the targeted location is at least about 90% homologous to a sequence of a portion of the contig sequence of one of the contigs NW_006874047.1, NW_006884592.1, NW_006881296.1, NW_003616412.1, NW_003615063.1, NW_006882936.1, and NW_003615411.1 or to a sequence selected from SEQ ID Nos. 1-7.

27. The method of claim 25, wherein the targeted location is within a sequence at least about 50% homologous to a 1000 nucleotide sequence: of NW_006874047.1 comprising position 45269; of NW_006884592.1 comprising position 207911; of NW_006881296.1 comprising position 491909; of NW_003616412.1 comprising position 79768; of NW_003615063.1 comprising position 315265; of NW_006882936.1 comprising position 2662054; or of NW_003615411.1 comprising position 97705.

28. The method of claim 23 or claim 24, wherein the exogenous nucleic acid encoding a recombinant product of interest is randomly integrated in the cellular genome of the modified CHO cells.

29. The method of any one of claims 22-28, wherein the recombinant product of interest comprises a recombinant protein.

30. The method of claim 29, wherein the recombinant protein is an antibody or an antigen-binding fragment thereof.

31. The method of claim 30, wherein antibody is a multispecific antibody or an antigen-binding fragment thereof.

32. The method of claim 31, wherein the antibody consists of a single heavy chain sequence and a single light chain sequence or antigen-binding fragments thereof.

33. The method of any one of claims 29-32, wherein the antibody is a chimeric antibody, a human antibody or a humanized antibody.

34. The method of any one of claims 29-33, wherein the antibody is a monoclonal antibody.

35. The method of claim 30, wherein the antibody is selected from: bevacizumab; trastuzumab; ranibizumab; efalizumab; rituximab, omalizumab, an anti-amyloid beta (Abeta) antibody; an anti-CD4 (MTRX1011A) antibody; an anti-EGFL7 (EGF-like-domain 7) antibody; an anti-IL13 antibody; an anti-Apomab antibody; an anti-DR5-targeted pro-apoptotic receptor agonist (PARA) antibody; an anti-BR3 antibody; an anti-CD268 antibody; an anti-BLyS receptor 3 antibody; an anti-BAFF-R (BAFF Receptor) antibody; an anti-beta 7 integrin subunit antibody; an anti-αᵥβ₈ integrin antibody; dacetuzumab (Anti-CD40); GA101 (anti-CD20 monoclonal antibody); MetMAb (anti-MET receptor tyrosine kinase antibody); an anti-neuropilin-1 (NRP1) antibody; ocrelizumab (anti-CD20 antibody); an anti-OX40 ligand antibody; an anti-oxidized LDL (oxLDL) antibody; pertuzumab (HER dimerization inhibitors (HDIs)); an anti-PD-L1 antibody; an anti-CD79b antibody; an anti-CD20×anti-CD3 bispecific antibody; an anti-VEGF-A×anti-angiopoietin-2 bispecific antibody; and rhuMAb IFN alpha.

36. The method of claim 23 or claim 24, wherein the nucleic acid sequence encoding the recombinant product of interest is integrated into the cellular genome of the CHO cell using a transposase-mediated gene integration system.

37. The method according to any one of claims 22-36 wherein the nuclease-assisted gene targeting system is selected from the group consisting of CRISPR/Cas9, CRISPR/Cpf1, zinc-finger nuclease, TALEN or meganuclease.

38. The method according to any one of claims 22-37, wherein the reduction of ERV expression is mediated by RNA silencing.

39. The method according to claim 38, wherein RNA silencing is selected from the group consisting of siRNA gene targeting and knock-down, shRNA gene targeting and knock-down, and miRNA gene targeting and knock-down.

40. The method according to any one of claims 22-39, wherein the modified CHO cell comprises gene knock-outs selected from: a) BAX; BAK; ICAM-1; GGTA1; CMAH; LPL; LPLA2; and PPT1; b) BAX; BAK; ICAM-1; SIRT-1; GGTA1; CMAH; LPL, LPLA2; and PPT1; c) BAX; BAK; ICAM-1; SIRT-1; MYC; GGTA1; CMAH; LPL; LPLA2; and PPT1; d) BAX; BAK; ICAM-1; SIRT-1; MYC; GGTA1; CMAH; LPL, LPLA2; PPT1; and LIPA; e) BAX; BAK; ICAM-1; GGTA1; CMAH; LPLA2; PPT1; and LIPA; f) BAX; BAK; ICAM-1; SIRT-1; GGTA1; CMAH; LPLA2; PPT1; and LIPA; g) BAX; BAK; ICAM-1; SIRT-1; MYC; GGTA1; CMAH; LPLA2; PPT1; and LIPA; h) BAX; BAK; ICAM-1; LPL; LPLA2; and PPT1; i) BAX; BAK; ICAM-1; SIRT-1; LPL, LPLA2; and PPT1; j) BAX; BAK; ICAM-1; SIRT-1; MYC; LPL; LPLA2; and PPT1; k) BAX; BAK; ICAM-1; SIRT-1; MYC; LPL; LPLA2; PPT1; and LIPA; 1) BAX; BAK; ICAM-1; SIRT-1; and MYC; m) BAX; BAK; ICAM-1; PERK; SIRT-1; and MYC; n) BAX; BAK; ICAM-1; SIRT-1; PERK; MYC; GGTA1; CMAH; LPL, LPLA2; PPT1; and LIPA; o) BAX; BAK; LPL; LPLA2; GGTA1; and CMAH; p) BAX; BAK; PERK; LPL; LPLA2; GGTA1; and CMAH; q) BAX; BAK; MYC; LPL; LPLA2; GGTA1; and CMAH; r) BAX; BAK; MYC; PERK; LPL; LPLA2; GGTA1; and CMAH; s) BAX; BAK; LPL; LPLA2; GGTA1; CMAH; and PPT1; t) BAX; BAK; PERK; LPL; LPLA2; GGTA1; CMAH; and PPT1; u) BAX; BAK; MYC; LPL; LPLA2; GGTA1; CMAH; and PPT1; v) BAX; BAK; MYC; PERK; LPL; LPLA2; GGTA1; CMAH; and PPT1; w) BAX; BAK; ICAM-1; and SIRT-1; x) BAX; BAK; and ICAM-1; y) BAX; BAK; BCKDHA; ICAM-1; GGTA1; CMAH; LPL; LPLA2; and PPT1; z) BAX; BAK; BCKDHA; ICAM-1; SIRT-1; GGTA1; CMAH; LPL; LPLA2; and PPT1; aa) BAX; BAK; BCKDHA; ICAM-1; SIRT-1; MYC; GGTA1; CMAH; LPL; LPLA2; and PPT1; bb) BAX; BAK; BCKDHA; ICAM-1; SIRT-1; MYC; GGTA1; CMAH; LPL, LPLA2; PPT1; and LIPA; cc) BAX; BAK; BCKDHA; ICAM-1; GGTA1; CMAH; LPLA2; PPT1; and LIPA; dd) BAX; BAK; BCKDHA; ICAM-1; SIRT-1; GGTA1; CMAH; LPLA2; PPT1; and LIPA; ee) BAX; BAK; BCKDHA; ICAM-1; SIRT-1; MYC; GGTA1; CMAH; LPLA2; PPT1; and LIPA; ff) BAX; BAK; BCKDHA; ICAM-1; LPL; LPLA2; and PPT1; gg) BAX; BAK; BCKDHA; ICAM-1; SIRT-1; LPL, LPLA2; and PPT1; hh) BAX; BAK; BCKDHA; ICAM-1; SIRT-1; MYC; LPL; LPLA2; and PPT1; ii) BAX; BAK; BCKDHA; ICAM-1; SIRT-1; MYC; LPL; LPLA2; PPT1; and LIPA; jj) BAX; BAK; BCKDHA; ICAM-1; SIRT-1; and MYC; kk) BAX; BAK; BCKDHA; ICAM-1; PERK; SIRT-1; and MYC; 11) BAX; BAK; BCKDHA; ICAM-1; PERK; SIRT-1; MYC; GGTA1; CMAH; LPL, LPLA2; PPT1; and LIPA; mm) BAX; BAK; BCKDHA; LPL; LPLA2; GGTA1; and CMAH; nn) BAX; BAK; BCKDHA; PERK; LPL; LPLA2; GGTA1; and CMAH; oo) BAX; BAK; BCKDHA; MYC; LPL; LPLA2; GGTA1; and CMAH; pp) BAX; BAK; BCKDHA; MYC; PERK; LPL; LPLA2; GGTA1; and CMAH; qq) BAX; BAK; BCKDHA; LPL; LPLA2; GGTA1; CMAH; and PPT1; rr) BAX; BAK; BCKDHA; PERK; LPL; LPLA2; GGTA1; CMAH; and PPT1; ss) BAX; BAK; BCKDHA; MYC; LPL; LPLA2; GGTA1; CMAH; and PPT1; tt) BAX; BAK; BCKDHA; MYC; PERK; LPL; LPLA2; GGTA1; CMAH; and PPT1; uu) BAX; BAK; BCKDHA; ICAM-1; and SIRT-1; vv) BAX; BAK; BCKDHA; and ICAM-1; ww) BAX; BAK; BCKDHB; ICAM-1; GGTA1; CMAH; LPL; LPLA2; and PPT1; xx) BAX; BAK; BCKDHB; ICAM-1; SIRT-1; GGTA1; CMAH; LPL; LPLA2; and PPT1; yy) BAX; BAK; BCKDHB; ICAM-1; SIRT-1; MYC; GGTA1; CMAH; LPL; LPLA2; and PPT1; zz) BAX; BAK; BCKDHB; ICAM-1; SIRT-1; MYC; GGTA1; CMAH; LPL, LPLA2; PPT1; and LIPA; aaa) BAX; BAK; BCKDHB; ICAM-1; GGTA1; CMAH; LPLA2; PPT1; and LIPA; bbb) BAX; BAK; BCKDHB; ICAM-1; SIRT-1; GGTA1; CMAH; LPLA2; PPT1; and LIPA; ccc) BAX; BAK; BCKDHB; ICAM-1; SIRT-1; MYC; GGTA1; CMAH; LPLA2; PPT1; and LIPA; ddd) BAX; BAK; BCKDHB; ICAM-1; LPL; LPLA2; and PPT1; eee) BAX; BAK; BCKDHB; ICAM-1; SIRT-1; LPL, LPLA2; and PPT1; fff) BAX; BAK; BCKDHB; ICAM-1; SIRT-1; MYC; LPL; LPLA2; and PPT1; ggg) BAX; BAK; BCKDHB; ICAM-1; SIRT-1; MYC; LPL; LPLA2; PPT1; and LIPA; hhh) BAX; BAK; BCKDHB; ICAM-1; SIRT-1; and MYC; iii) BAX; BAK; BCKDHB; ICAM-1; PERK; SIRT-1; and MYC; jjj) BAX; BAK; BCKDHB; ICAM-1; PERK; SIRT-1; MYC; GGTA1; CMAH; LPL, LPLA2; PPT1; and LIPA; kkk) BAX; BAK; BCKDHB; LPL; LPLA2; GGTA1; and CMAH; 111) BAX; BAK; BCKDHB; PERK; LPL; LPLA2; GGTA1; and CMAH; mmm) BAX; BAK; BCKDHB; MYC; LPL; LPLA2; GGTA1; and CMAH; nnn) BAX; BAK; BCKDHB; MYC; PERK; LPL; LPLA2; GGTA1; and CMAH; ooo) BAX; BAK; BCKDHB; LPL; LPLA2; GGTA1; CMAH; and PPT1; ppp) BAX; BAK; BCKDHB; PERK; LPL; LPLA2; GGTA1; CMAH; and PPT1; qqq) BAX; BAK; BCKDHB; MYC; LPL; LPLA2; GGTA1; CMAH; and PPT1; rrr) BAX; BAK; BCKDHB; MYC; PERK; LPL; LPLA2; GGTA1; CMAH; and PPT1; sss) BAX; BAK; BCKDHB; ICAM-1; and SIRT-1; ttt) BAX; BAK; BCKDHB; and ICAM-1; uuu) BAX; BAK; BCKDHA; BCKDHB; ICAM-1; GGTA1; CMAH; LPL; LPLA2; and PPT1; vvv) BAX; BAK; BCKDHA; BCKDHB; ICAM-1; SIRT-1; GGTA1; CMAH; LPL; LPLA2; and PPT1; www) BAX; BAK; BCKDHA; BCKDHB; ICAM-1; SIRT-1; MYC; GGTA1; CMAH; LPL; LPLA2; and PPT1; xxx) BAX; BAK; BCKDHA; BCKDHB; ICAM-1; SIRT-1; MYC; GGTA1; CMAH; LPL, LPLA2; PPT1; and LIPA; yyy) BAX; BAK; BCKDHA; BCKDHB; ICAM-1; GGTA1; CMAH; LPLA2; PPT1; and LIPA; zzz) BAX; BAK; BCKDHA; BCKDHB; ICAM-1; SIRT-1; GGTA1; CMAH; LPLA2; PPT1; and LIPA; aaaa) BAX; BAK; BCKDHA; BCKDHB; ICAM-1; SIRT-1; MYC; GGTA1; CMAH; LPLA2; PPT1; and LIPA; bbbb) BAX; BAK; BCKDHA; BCKDHB; ICAM-1; LPL; LPLA2; and PPT1; cccc) BAX; BAK; BCKDHA; BCKDHB; ICAM-1; SIRT-1; LPL, LPLA2; and PPT1; dddd) BAX; BAK; BCKDHA; BCKDHB; ICAM-1; SIRT-1; MYC; LPL; LPLA2; and PPT1; eeee) BAX; BAK; BCKDHA; BCKDHB; ICAM-1; SIRT-1; MYC; LPL; LPLA2; PPT1; and LIPA; ffff) BAX; BAK; BCKDHA; BCKDHB; ICAM-1; SIRT-1; and MYC; gggg) BAX; BAK; BCKDHA; BCKDHB; ICAM-1; PERK; SIRT-1; and MYC; hhhh) BAX; BAK; BCKDHA; BCKDHB; ICAM-1; PERK; SIRT-1; MYC; GGTA1; CMAH; LPL, LPLA2; PPT1; and LIPA; iiii) BAX; BAK; BCKDHA; BCKDHB; LPL; LPLA2; GGTA1; and CMAH; jjjj) BAX; BAK; BCKDHA; BCKDHB; PERK; LPL; LPLA2; GGTA1; and CMAH; kkkk) BAX; BAK; BCKDHA; BCKDHB; MYC; LPL; LPLA2; GGTA1; and CMAH; llll) BAX; BAK; BCKDHA; BCKDHB; MYC; PERK; LPL; LPLA2; GGTA1; and CMAH; mmmm) BAX; BAK; BCKDHA; BCKDHB; LPL; LPLA2; GGTA1; CMAH; and PPT1; nnnn) BAX; BAK; BCKDHA; BCKDHB; PERK; LPL; LPLA2; GGTA1; CMAH; and PPT1; oooo) BAX; BAK; BCKDHA; BCKDHB; MYC; LPL; LPLA2; GGTA1; CMAH; and PPT1; pppp) BAX; BAK; BCKDHA; BCKDHB; MYC; PERK; LPL; LPLA2; GGTA1; CMAH; and PPT1; qqqq) BAX; BAK; BCKDHA; BCKDHB; ICAM-1; and SIRT-1; or rrrr) BAX; BAK; BCKDHA; BCKDHB; and ICAM-1

41. A method for producing recombinant product of interest, comprising:
(a) culturing a CHO cell of any one of claims 9-21 under conditions resulting in the expression of the recombinant product of interest, and
(b) recovering the recombinant product of interest from the cultivation medium or the modified CHO cells.

42. The method of claim 41, wherein the exogenous nucleic acid encoding a recombinant product of interest is integrated in the cellular genome of the modified cells at one or more targeted locations.

43. The method of claim 42, wherein the targeted location is at least about 90% homologous to a sequence of a portion of the contig sequence of one of the contigs NW_006874047.1, NW_006884592.1, NW_006881296.1, NW_003616412.1, NW_003615063.1, NW_006882936.1, and NW_003615411.1 or to a sequence selected from SEQ ID Nos. 1-7.

44. The method of claim 42, wherein the targeted location is within a sequence at least about 50% homologous to a 1000 nucleotide sequence: of NW_006874047.1 comprising position 45269; of NW_006884592.1 comprising position 207911; of NW_006881296.1 comprising position 491909; of NW_003616412.1 comprising position 79768; of NW_003615063.1 comprising position 315265; of NW_006882936.1 comprising position 2662054; or of NW_003615411.1 comprising position 97705.

45. The method of claim 41, wherein the exogenous nucleic acid encoding a recombinant product of interest is randomly integrated in the cellular genome of the modified CHO cells.

46. The method of any one of claims 41-45, wherein the recombinant product of interest comprises a recombinant protein.

47. The method of claim 46, wherein the recombinant protein is an antibody or an antigen-binding fragment thereof.

48. The method of claim 47, wherein antibody is a multispecific antibody or an antigen-binding fragment thereof.

49. The method of claim 47, wherein the antibody consists of a single heavy chain sequence and a single light chain sequence or antigen-binding fragments thereof.

50. The method of any one of claims 47-49, wherein the antibody is a chimeric antibody, a human antibody or a humanized antibody.

51. The method of any one of claims 47-50, wherein the antibody is a monoclonal antibody.

52. The method of claim 47, wherein the antibody is selected from: bevacizumab; trastuzumab; ranibizumab; efalizumab; rituximab, omalizumab, an anti-amyloid beta (Abeta) antibody; an anti-CD4 (MTRX1011A) antibody; an anti-EGFL7 (EGF-like-domain 7) antibody; an anti-IL13 antibody; an anti-Apomab antibody; an anti-DR5-targeted pro-apoptotic receptor agonist (PARA) antibody; an anti-BR3 antibody; an anti-CD268 antibody; an anti-BLyS receptor 3 antibody; an anti-BAFF-R (BAFF Receptor) antibody; an anti-beta 7 integrin subunit antibody; an anti-αᵥβ₈ integrin antibody; dacetuzumab (Anti-CD40); GA101 (anti-CD20 monoclonal antibody); MetMAb (anti-MET receptor tyrosine kinase antibody); an anti-neuropilin-1 (NRP1) antibody; ocrelizumab (anti-CD20 antibody); an anti-OX40 ligand antibody; an anti-oxidized LDL (oxLDL) antibody; pertuzumab (HER dimerization inhibitors (HDIs)); an anti-PD-L1 antibody; an anti-CD79b antibody; an anti-CD20×anti-CD3 bispecific antibody; an anti-VEGF-A×anti-angiopoietin-2 bispecific antibody; and rhuMAb IFN alpha

53. The method of claim 41, wherein the nucleic acid sequence encoding the recombinant product of interest is integrated into the cellular genome of the CHO cell using a transposase-mediated gene integration system.

54. The method according to any one of claims 41-53 wherein the nuclease-assisted gene targeting system is selected from the group consisting of CRISPR/Cas9, CRISPR/Cpf1, zinc-finger nuclease, TALEN or meganuclease.

55. The method according to any one of claims 41-54, wherein the modified CHO cell comprises gene knock-outs selected from: a) BAX; BAK; ICAM-1; GGTA1; CMAH; LPL; LPLA2; and PPT1; b) BAX; BAK; ICAM-1; SIRT-1; GGTA1; CMAH; LPL, LPLA2; and PPT1; c) BAX; BAK; ICAM-1; SIRT-1; MYC; GGTA1; CMAH; LPL; LPLA2; and PPT1; d) BAX; BAK; ICAM-1; SIRT-1; MYC; GGTA1; CMAH; LPL, LPLA2; PPT1; and LIPA; e) BAX; BAK; ICAM-1; GGTA1; CMAH; LPLA2; PPT1; and LIPA; f) BAX; BAK; ICAM-1; SIRT-1; GGTA1; CMAH; LPLA2; PPT1; and LIPA; g) BAX; BAK; ICAM-1; SIRT-1; MYC; GGTA1; CMAH; LPLA2; PPT1; and LIPA; h) BAX; BAK; ICAM-1; LPL; LPLA2; and PPT1; i) BAX; BAK; ICAM-1; SIRT-1; LPL, LPLA2; and PPT1; j) BAX; BAK; ICAM-1; SIRT-1; MYC; LPL; LPLA2; and PPT1; k) BAX; BAK; ICAM-1; SIRT-1; MYC; LPL; LPLA2; PPT1; and LIPA; 1) BAX; BAK; ICAM-1; SIRT-1; and MYC; m) BAX; BAK; ICAM-1; PERK; SIRT-1; and MYC; n) BAX; BAK; ICAM-1; SIRT-1; PERK; MYC; GGTA1; CMAH; LPL, LPLA2; PPT1; and LIPA; o) BAX; BAK; LPL; LPLA2; GGTA1; and CMAH; p) BAX; BAK; PERK; LPL; LPLA2; GGTA1; and CMAH; q) BAX; BAK; MYC; LPL; LPLA2; GGTA1; and CMAH; r) BAX; BAK; MYC; PERK; LPL; LPLA2; GGTA1; and CMAH; s) BAX; BAK; LPL; LPLA2; GGTA1; CMAH; and PPT1; t) BAX; BAK; PERK; LPL; LPLA2; GGTA1; CMAH; and PPT1; u) BAX; BAK; MYC; LPL; LPLA2; GGTA1; CMAH; and PPT1; v) BAX; BAK; MYC; PERK; LPL; LPLA2; GGTA1; CMAH; and PPT1; w) BAX; BAK; ICAM-1; and SIRT-1; x) BAX; BAK; and ICAM-1; y) BAX; BAK; BCKDHA; ICAM-1; GGTA1; CMAH; LPL; LPLA2; and PPT1; z) BAX; BAK; BCKDHA; ICAM-1; SIRT-1; GGTA1; CMAH; LPL; LPLA2; and PPT1; aa) BAX; BAK; BCKDHA; ICAM-1; SIRT-1; MYC; GGTA1; CMAH; LPL; LPLA2; and PPT1; bb) BAX; BAK; BCKDHA; ICAM-1; SIRT-1; MYC; GGTA1; CMAH; LPL, LPLA2; PPT1; and LIPA; cc) BAX; BAK; BCKDHA; ICAM-1; GGTA1; CMAH; LPLA2; PPT1; and LIPA; dd) BAX; BAK; BCKDHA; ICAM-1; SIRT-1; GGTA1; CMAH; LPLA2; PPT1; and LIPA; ee) BAX; BAK; BCKDHA; ICAM-1; SIRT-1; MYC; GGTA1; CMAH; LPLA2; PPT1; and LIPA; ff) BAX; BAK; BCKDHA; ICAM-1; LPL; LPLA2; and PPT1; gg) BAX; BAK; BCKDHA; ICAM-1; SIRT-1; LPL, LPLA2; and PPT1; hh) BAX; BAK; BCKDHA; ICAM-1; SIRT-1; MYC; LPL; LPLA2; and PPT1; ii) BAX; BAK; BCKDHA; ICAM-1; SIRT-1; MYC; LPL; LPLA2; PPT1; and LIPA; jj) BAX; BAK; BCKDHA; ICAM-1; SIRT-1; and MYC; kk) BAX; BAK; BCKDHA; ICAM-1; PERK; SIRT-1; and MYC; 11) BAX; BAK; BCKDHA; ICAM-1; PERK; SIRT-1; MYC; GGTA1; CMAH; LPL, LPLA2; PPT1; and LIPA; mm) BAX; BAK; BCKDHA; LPL; LPLA2; GGTA1; and CMAH; nn) BAX; BAK; BCKDHA; PERK; LPL; LPLA2; GGTA1; and CMAH; oo) BAX; BAK; BCKDHA; MYC; LPL; LPLA2; GGTA1; and CMAH; pp) BAX; BAK; BCKDHA; MYC; PERK; LPL; LPLA2; GGTA1; and CMAH; qq) BAX; BAK; BCKDHA; LPL; LPLA2; GGTA1; CMAH; and PPT1; rr) BAX; BAK; BCKDHA; PERK; LPL; LPLA2; GGTA1; CMAH; and PPT1; ss) BAX; BAK; BCKDHA; MYC; LPL; LPLA2; GGTA1; CMAH; and PPT1; tt) BAX; BAK; BCKDHA; MYC; PERK; LPL; LPLA2; GGTA1; CMAH; and PPT1; uu) BAX; BAK; BCKDHA; ICAM-1; and SIRT-1; vv) BAX; BAK; BCKDHA; and ICAM-1; ww) BAX; BAK; BCKDHB; ICAM-1; GGTA1; CMAH; LPL; LPLA2; and PPT1; xx) BAX; BAK; BCKDHB; ICAM-1; SIRT-1; GGTA1; CMAH; LPL; LPLA2; and PPT1; yy) BAX; BAK; BCKDHB; ICAM-1; SIRT-1; MYC; GGTA1; CMAH; LPL; LPLA2; and PPT1; zz) BAX; BAK; BCKDHB; ICAM-1; SIRT-1; MYC; GGTA1; CMAH; LPL, LPLA2; PPT1; and LIPA; aaa) BAX; BAK; BCKDHB; ICAM-1; GGTA1; CMAH; LPLA2; PPT1; and LIPA; bbb) BAX; BAK; BCKDHB; ICAM-1; SIRT-1; GGTA1; CMAH; LPLA2; PPT1; and LIPA; ccc) BAX; BAK; BCKDHB; ICAM-1; SIRT-1; MYC; GGTA1; CMAH; LPLA2; PPT1; and LIPA; ddd) BAX; BAK; BCKDHB; ICAM-1; LPL; LPLA2; and PPT1; eee) BAX; BAK; BCKDHB; ICAM-1; SIRT-1; LPL, LPLA2; and PPT1; fff) BAX; BAK; BCKDHB; ICAM-1; SIRT-1; MYC; LPL; LPLA2; and PPT1; ggg) BAX; BAK; BCKDHB; ICAM-1; SIRT-1; MYC; LPL; LPLA2; PPT1; and LIPA; hhh) BAX; BAK; BCKDHB; ICAM-1; SIRT-1; and MYC; iii) BAX; BAK; BCKDHB; ICAM-1; PERK; SIRT-1; and MYC; jjj) BAX; BAK; BCKDHB; ICAM-1; PERK; SIRT-1; MYC; GGTA1; CMAH; LPL, LPLA2; PPT1; and LIPA; kkk) BAX; BAK; BCKDHB; LPL; LPLA2; GGTA1; and CMAH; 111) BAX; BAK; BCKDHB; PERK; LPL; LPLA2; GGTA1; and CMAH; mmm) BAX; BAK; BCKDHB; MYC; LPL; LPLA2; GGTA1; and CMAH; nnn) BAX; BAK; BCKDHB; MYC; PERK; LPL; LPLA2; GGTA1; and CMAH; ooo) BAX; BAK; BCKDHB; LPL; LPLA2; GGTA1; CMAH; and PPT1; ppp) BAX; BAK; BCKDHB; PERK; LPL; LPLA2; GGTA1; CMAH; and PPT1; qqq) BAX; BAK; BCKDHB; MYC; LPL; LPLA2; GGTA1; CMAH; and PPT1; rrr) BAX; BAK; BCKDHB; MYC; PERK; LPL; LPLA2; GGTA1; CMAH; and PPT1; sss) BAX; BAK; BCKDHB; ICAM-1; and SIRT-1; ttt) BAX; BAK; BCKDHB; and ICAM-1; uuu) BAX; BAK; BCKDHA; BCKDHB; ICAM-1; GGTA1; CMAH; LPL; LPLA2; and PPT1; vvv) BAX; BAK; BCKDHA; BCKDHB; ICAM-1; SIRT-1; GGTA1; CMAH; LPL; LPLA2; and PPT1; www) BAX; BAK; BCKDHA; BCKDHB; ICAM-1; SIRT-1; MYC; GGTA1; CMAH; LPL; LPLA2; and PPT1; xxx) BAX; BAK; BCKDHA; BCKDHB; ICAM-1; SIRT-1; MYC; GGTA1; CMAH; LPL, LPLA2; PPT1; and LIPA; yyy) BAX; BAK; BCKDHA; BCKDHB; ICAM-1; GGTA1; CMAH; LPLA2; PPT1; and LIPA; zzz) BAX; BAK; BCKDHA; BCKDHB; ICAM-1; SIRT-1; GGTA1; CMAH; LPLA2; PPT1; and LIPA; aaaa) BAX; BAK; BCKDHA; BCKDHB; ICAM-1; SIRT-1; MYC; GGTA1; CMAH; LPLA2; PPT1; and LIPA; bbbb) BAX; BAK; BCKDHA; BCKDHB; ICAM-1; LPL; LPLA2; and PPT1; cccc) BAX; BAK; BCKDHA; BCKDHB; ICAM-1; SIRT-1; LPL, LPLA2; and PPT1; dddd) BAX; BAK; BCKDHA; BCKDHB; ICAM-1; SIRT-1; MYC; LPL; LPLA2; and PPT1; eeee) BAX; BAK; BCKDHA; BCKDHB; ICAM-1; SIRT-1; MYC; LPL; LPLA2; PPT1; and LIPA; ffff) BAX; BAK; BCKDHA; BCKDHB; ICAM-1; SIRT-1; and MYC; gggg) BAX; BAK; BCKDHA; BCKDHB; ICAM-1; PERK; SIRT-1; and MYC; hhhh) BAX; BAK; BCKDHA; BCKDHB; ICAM-1; PERK; SIRT-1; MYC; GGTA1; CMAH; LPL, LPLA2; PPT1; and LIPA; iiii) BAX; BAK; BCKDHA; BCKDHB; LPL; LPLA2; GGTA1; and CMAH; jjjj) BAX; BAK; BCKDHA; BCKDHB; PERK; LPL; LPLA2; GGTA1; and CMAH; kkkk) BAX; BAK; BCKDHA; BCKDHB; MYC; LPL; LPLA2; GGTA1; and CMAH; llll) BAX; BAK; BCKDHA; BCKDHB; MYC; PERK; LPL; LPLA2; GGTA1; and CMAH; mmmm) BAX; BAK; BCKDHA; BCKDHB; LPL; LPLA2; GGTA1; CMAH; and PPT1; nnnn) BAX; BAK; BCKDHA; BCKDHB; PERK; LPL; LPLA2; GGTA1; CMAH; and PPT1; oooo) BAX; BAK; BCKDHA; BCKDHB; MYC; LPL; LPLA2; GGTA1; CMAH; and PPT1; pppp) BAX; BAK; BCKDHA; BCKDHB; MYC; PERK; LPL; LPLA2; GGTA1; CMAH; and PPT1; qqqq) BAX; BAK; BCKDHA; BCKDHB; ICAM-1; and SIRT-1; or rrrr) BAX; BAK; BCKDHA; BCKDHB; and ICAM-1

56. The method of any of claims 41-55, comprising purifying the recombinant product of interest, and/or formulating the recombinant product of interest.

The application's sequence listing, which the Patent Office published only in electronic form, follows.

SEQUENCE LISTING (14 sequences)

SEQ ID NO: 1 - DNA, 727214 bp, synthetic construct
  source 1..727214: mol_type = other DNA; note = LOC107977062 Contig Sequence
  misc_difference 1..727214: note = N can be a,g,c,t
ctgatctgaacaaagggttgctcatggaccccagactgatagctgggaatcgaacataggacagatccagaccccctgaatgagaaggtcagtttggagacctggtgaatctatggagcctctggtagtggatcagtatttaccccaggtacagctccagcatctcctcgctgggccagcttagctgtgtagagaggctggggtccctgggtcagagactaaaagacacagcttcaaccagggcagaggccagaagcctgtctcaattctcctttttgatctgagttcagatggtcatgtatgaactttcttacctcagacatggatctnnnnnnnnnnnnnnnnnnnnnnnnnnnnnnnnnnnnnnnnnnnnnnnnnnnnnnnnnnnnnnnnnnnnnnnnnnnnnnnnnnnnnnnnnnnnnnnnnnnnnnnnnnnnnnnnnnnnnnnnnnnnnnnnnnnnnnnnnnnnnnnnnnnnnnnnnnnnnnnnnnnnnnnnnnnnnnnnnnnnnnnnnnnnnnnnnnnnnnnnnnnnnnnnnnnnnnnnnnnnnnnnnnnnnnnnnnnnnnnnnnnnnnnnnnnnnnnnnnnnnnnnnnnnnnnnnnnnnnnnnnnnnnnnnnnnnnnnnnnnnnnnnnnnnnnnnnnnnnnnnnnnnnnnnnnnnnnnnnnnnnnnnnnnnnnnnnnnnnnnnnnnnnnnnnnnnnnnnnnnnnnnnnnnnnnnnnnnnnnnnnnnnnnnnnnnnnnnnnnnnnnnnnnnnnnnnnnnnnnnnnnnnnnnnnnnnnnnnnnnnnnnnnnnnnnnnnnnnnnnnnnnnnnnnnnnnnnnnnnnnnnnnnnnnnnnnnnnnnnnnnnnnnnnnnnnnnnnnnnnnnnnnnnnnnnnnnnnnnnnnnnnnnnnnnnnnnnnnnnnnnnnnnnnnnnnnnnnnnnnnnnnnnnnnnnnnnnnnnnnnnnnnnnnnnnnnnnnnnnnnnnnnnnnnnnnnnnnnnnnnnnnnnnnnnnnnnnnnnnnnnnnnnnnnnnnnnnnnnnnnnnnnnnnnnnnnnnnnnnnnnnnnnnnnnnnnnnnnnnnnnnnnnnnnnnnnnnnnnnnnnnnnnnnnnnnnnnnnnnnnnnnnnnnnnnnnnnnnnnnnnnnnnnnnnnnnnnnnnnnnnnnnnnnnnnnnnnnnnnnnnnnnnnnnnnnnnnnnnnnnnnnnnnnnnnnnnnnnnnnnnnnnnnnnnnnnnnnnnnnnnnnnnnnnnnnnnnnnnnnnnnnnnnnnnnnnnnnnnnnnnnnnnnnnnnnnnnnnnnnnnnnnnnnnnnnnnatgtgtgatgtctgtggagcccagaagagggcactggagccacctgacatgggagccagacatcaaccccggggtcctctgtaagagcagccagtgctctttccactcagccctctctcctgctggagatccccatttctgaagagatttggccaaatcttggtaggagatgttcacagagaaagccaggaaactctagacaactcagtttccattagagtcccctttctgcccaatcacgtgtgtgctggatggttttctgtcagcttgacacagcgaaaggcatctgagaagaccgaatctcaattacgaaaatgcctcaggaagatcaggctataggtcagcctgtagcgcattttctttctttttttgagacagcgtttctttgtgtgtagctctggatatccaggaccaggatggcctttgaactcccagagattcacacctgtctctgcctctcaagtgctgggattaaaggtgtacactaccattgcctagcaggcattttcttatttagagatttatgaaggagagcccagcctattgtggttggtgcaatcccaggactggtggtccttttttctataagaaagcaggatgagagatgggcatagtagtccacgcctttagtcctagcacttgagagctagaggctggcagatctctgagttcaaggacagactggattacagagtgagttccaggacatctgggtttctacagagaagcacaaccctgtcttggaaatccacagggtggaaaataaaagcagtctttacaaactatgatgagcaaggcagtaagcagcaccctctatggcctctgcatcagctcctgcctccaggttcctgccctgtgtgacttcctgtcctgacttccttcgatgatgaacagtgccatgtttaagtcggctgaacaaaccttttcctccccaagttcctctggtcatggtgtttcatcacagcaatagaaacccagattaggacatgtccctgtggttttagttacccagtaaagtccccataaaacaataaggagtgagaggtgggtgtctaatgagagttcctgagaatcaaaccctgtaaccaatgcgacaccttagctcttctaaaacaccaatgttgctgctgccctcttccaaccatctctagaaatgttcttgcaggtgttgactgtagtaggagttaatgagccccttgatctgtctcaaaaaacagcagatgatgggactggagatggttaagagcactgtctgctcttacagaggacttgagtttggtacccagtatccacatagcagcttaaaaccatctggaagtcaagttccaggggcactgtcgccctcttatgtcctccacggagagtgcacatgtgtacagacacacacacaacacacacacacacacacacacacacacacacacacacaaaatactcatgcacataaagtaaaaataaaactataagaataatccagacggtgtcttccgtgggtaatgttgctgacagcacataaccaactacacagacaggtttgcttgctgtggtggctcatcttgtcagtgtgctgcacctgggaagagtgggcctcatctgaggagttgccgtcatcagattggcctgtggattatttgtgggcattttcttgattgctggtttatagggagcagaggaagccatgagtgagtgagtgaatgtgtgagtgcctgtgtgagtgtgtgtgtgagtgagtgtgtatgtgagtgtgtgagcgagtgagtgtgtattttgacttgggcatggctggttaaggacttctagaacaatggccatggaactttgacaatgacagtaccaatccaggcctggctcatgagggatggtattgttccatgtttttgctctttttgctctttggccttttttcaggggccaccacccagctccaagtaaaccacacagggaggtttattctcagttatgtgtgcctggccttagctcaccttgtttctagctagctttaattaagtaacccatctactctgggcttttatccttcttattttcctttctactccatggctggctggctgggtgggtggctgggtggctgggtggctgggtgactgggtggctgggtggctgggtggctgggtggctgggtggcccccatcttcctcctttccttgctctcttgctaatctttgtttctccttctatttatacctccgcctgccagccccgcccatccttgctcctgcctcactattggccattcatctattattaggactacagggtgttttagacaggcacagtaacacagcttcacacagttaaacaaatgcagcataaaccaaagtcacacacgtaaaaataatattccccaaaaggatggcaaagctttccttgggagtccaagtgtgagtgtctatgaactgttgatccatgtgtgcaaagattaccaacagtggcttcctgttcctggatgtttgcagcctgagactgctcacctatagagacctcgtacccagattagctagccccttcctccactgtactttaaacttgtgaaggttccaggttgtaacggtgtcagtagcattagagagacacaccgtatcccggcttcattgtgtgtgtgtgtgtgtgtgtgtgtgtgtgtgtgtgtgtgtgtgtgtcctttcttcattccctcactacctctagctagggttctaggaccagagcagtgggtgctacactcatgatagggatggcccagctcagtgtagacactcccacgcttaggcaggtgcgcctggggtttacaaaaagcagcttgcccaggaatccagtgagagccaggcagtgagcaagtctcatggtctctgcttcaggttctgcctccagctccaaggatgggctgtaacctgcaccccaaataaaccctttccactgcaagatgctttgggtcaccgtgtgtgtcccagcaaataagcgaactaggatagtatctgatggttggttgattgcaacactgtctcagccagggtttctattgctgcaatgaaacacccggaacaaaaaccaacatggtgaggaaagggtttgttcagcttacacttccacatcactgttcatcatctaaggaattcaggacaggaactcacacagggcaggaacctgagggaggagctgatgccaatgtcatggatgggacctgcttctgggcttgctcctcatggcttgctcagcctgttttctcatagaatccaggaccaccagcctagggatggaaccacccacaatgggccaggccctcccccattgatggctgattgagaaaatgccctacagctggatctcgtggaggcatttctaattgcgttgtcctttcagatagctctagttagtgtgtcaagttgacataaaacttgttagcacacacatcactagaatagttgtctgggcctggaaagatggtccagtgtttggcttatgtagggagacactgtagccccgaatcctaggagccctacaggtgtgcctgaccatgcccgagctgaaggctagtcacatagaggaatctaccaccccttggaattctatcaagaattagtcaggtaactggagaatgctgacagacctgaaagtcataaataaggtaattcaacctatgggctctctacagcctggaatgccactgccttccttaatgaatattgaataatgaatattgacaaataactcttaccgacttttggggaacaattagtaacaactatcccaaaactgacagaattaaaatcataaaagaagacggcctggattcttttatgcattgtaagacaaactcccatttctggagttcttacctaaaggatggctgatcatagtaattgacctgaaagactgcttttttactataccattacaagaaagtgttagagggaaatttgcatttactgcaccaattctaaataactcacagtcagttcggagatatcagtggaaggttttacctcaggggatgctaaatagtcctactttgtgtcaacactttgtacaacaacctttggaaataattcataaaaaaatttccacaatctcttgtttatctttatatggatgatattcttttataagattctaataaagaaactcggaatgtatgtttgacatggtgaaggaagttctgcctagatggaggttacaaatagccccagaaaagatacaaagaggagattctattaactatttaggatataagatagacttacaaagaattaggccacagaaggtgcaaattagaagggaccgttgtcaaactctgaacagtcttcagaagctactaggagaaatttctcaattacagacgattattggtgtagaaggacatgacttaaagcatttaaagatggcactgaaagatgataaggacctaaacagtccacgaatattatctgccgaggcagaaaaacaactacaatgggtagaaaacagaatattgaatgcacatgtagatcggataaaccttgatttagactgcattctggtcatcttgccatccagagaatacccttctgggattctgatgcagagggaagacactatattggaatggatatttctgccacataaacagaataaaaagttaaagacatatatagaaaagatttctgatttgattttaaagggcaaattaagacttcgtcagctgactggaaaagatccagcagaaattatagtacctttaactaatgatgaaatttcctccttatgggaggataatgaatattgacaaatagctcttaccgactttttgggaacaattagtaacaactatcccaaaactgacagaattaaaatcataaaagaagacggtctggattcttccacgtattgtaagacaaactcccaattctggagttcttaccttttacactgatgctaacaaatcaagtaaggcagcttataaagcaggtgaggtaagtaaagtaattcaaagtccgtatacatctgtacagaaggcagaattatatgcaattctcatggtgcttatggatttcacagaacctcttaacatagttactgattcccaatatgcagagagaattgtcttacacatagagaccgcagaattcgtccctgataatactaaattaacctcattgttcttacaattccagaaaacaatcagaaacagaagtaatcctctgtacattacacatatcagatcccatacaggtctgccaggcccactagcacaaggcaatgacgagattgatcgtttattaattggcactgtgctagaagcctcagatttcataaaaaaacatcatgtaaatagcaaaggtttaaagaagaacttctccatcacttggcaacaagccaaggagataatgagaaactgtcttacttgtttcttgtataaccaaactcggctgcctaaaggcattcggaggaatgagatctggcagatggaagtctttcactttacagaatttggaaatttggaatatgtgcatcataccattgacacattctcagacttccaatgggctactactctcaactctgaaaaaactgattctgttattacacacctgctagagatgatggcagttatgggtatacctgcacaaataaaaactgacaatgttctggcatatgtctccacaaaaatggaacagttcttcaaatattataacataaagcatgtcaccagtataccatacaatactttgggacaagatgtggttgaaagatctaatagaacacttaaggagatgctccatagacaagctggtaagtcaaaaaaccccaaaacataggttgcataatgctttgttgacactaaactttcttaatgccaatgacaaacagcttcagaaagatactggactacggaaaaaaaactgctgaactgaatcaaacagtatacttcaaagatgtactgacctcggtatggaagcctggacatgtgttacattgggataggggttttgcatttatttccacaggagaagaaaaactttggataccatcaaagttgatcaagatttgagttgaaaaagacaaacctatcgacaaggatgagtgacaggtatttactgaggtatatctcataaactaaatagaaacctcccaaagaaaagggaagtgttttgcttctatcttcacaatcttcacaggaaaactcatctccggaagtcaaaggacactacatgagtagatacttaaggaaagaaggtagctataaccatcaaacaaaaggaacgtgtcatgtggtaaactttacagctttctctcaaataactctatttctctttatttcctagtccctataaaaactgacaatgctccagcatatgtctccacaaaaatggaacagttcttcaaatattataacattaagcatgtcacaggtataccacacaaccctacaggacaagcaattgttgaaaggtctaacaggacacttaaggagatgctccataggcaagctggtaaatcaaaaccacccaaacatagattgcataatgcttattaacactaaactttcttaatgacaatgacaatggacaaacagctgcggaaagacactggactacagaaaaaactgctgaactgaannnnnnnnnnnnnnnnnnnnnnnnnnnnnnnnnnnnnnnnnnnnnnnnnnnnnnnnnnnaggggttttgcatttgtttccacaggagaagaaaatctttggataccattaaagttgatcaagatttgaattgaaaaagacaaccctcttgacaaagacgactgacaagtatttactgaggtatatctcatgaactaaataaaagcctcccaaagaatgggaagtgctttgttttatcctcacaggaaacccacctccggaagtcaaaggacactacatgagtagatacttaaggaaagaaggtagctataaccatcaaacaaaaggtaccctagagtggtgtaggaggggattgcaggtcccctcaggctgtaacgacccccatcactgttcagggatctctttcgttagagaaatcttattttcctccatttatttccctttcttttaaaaatatttatttttatgtgtatgggtgtttgacaagagtgttatgtccctgcaccatgtgaatgcagtgccccgggcggccagaagagggcagcccatccccccatcctgggcgtgggtggggtggggtgggctggagttacaggtgggtgtgagctggggaccgaacccaggtcctttggaagagcaatgagtgctcttcagccctgagcaatctctccagctccatacttgtccttggaaatgacaccatgctgagttttctggggttcttttctcttgcagcccagggcctcacccaaggcctgggccacgaaccccacccctgcctcctgcagagagggtttgaacagaagctctgggctctcagggtcacagagtgcaagccatgtacacactgatcaaagaaaaggagtttcccatctgtccccactgtcattctctacaggaaggtcccatgtcctccagtacaaacgcagcattagcacaactcacacatggaactttccagaccaacaggttctcctggatggtccccagctgaacttggtgttttgtcaaggtgcttcttacactctacccgtgcctgtttttaatgtgtagcctctgattacgtctttataccaaagcttttattttcttttcttttttttctttttttctgagatagggtttctctgtggctttggaggctgtcctggaactcattctgtagaccagggtggccagggattcacagagatctgcctgcctctgcctcccgagtgctgggattaaaggcatgcggcaccaatgcctggcttattccaaagctttagtactagcctttgaaataacagcaaaccctgttctttgagattttccccacacaccgggaatgttgcacagtgaacagagtgtccaccttgtacaccccaggccctgggttcaatttctcaacatctccacaactagtgtggtggcacacaggacaggcaggtgggacggctcagtagttagaggagcttgccaccaagtttgaccacatgatttcagtccccataacccacagtggaaagagagaactggctccccaaagttctcttctgacctgcacacatgagtgtgtgcacacgtcacacacacacacacacacacacacacacacacacacacacacacacagagataccatggctgggccgtgcctcatttgcaaatcaaatacatacagtaacacaataaatacataaaatagtttaacagtttagaaagaagattattgggagctggagagatggctcagaggttaagagcaccggctgctcttccagaggtcctgagttcaattcccagcaacgacacggtggctcacaaccatccataatgagatctggtgccctcttctggttgtgcagatagatatacatggaagcaaaatgttgtatacataataaatttttaaaaaaagaaagaagattattttacatgtcaatcccaggtccctctccctcccctcctcccctgccgcccacaaactaacaccctacctatcccataccctttctgctctccagggagggtgagtccttccgtagggggtcttcagagtctgtcatatcctttgggatagggcataggctcacctcctagtgtctaggctcagggagtatccctccatgtgggatgggctctcaaggtccattcctatgctagggataagtacaagaggccccatatatttctgaggtctcctctctgacacccacgttcaggggtgtggatcagtcccatgctggtttcccagctatcagtctgggaaccaagagctctcccttgttcaggtcagctgtttctgtgggtttcaccagcctggtgtggacccctttgctcatcagtcctccttctctgcaactggatttcagttctgttcaaggtttagctgagggtgtctgcttctacttccaccagctgctggatgaaggctataggatggcatataagtcagtcatcaatctcattatcaggggagggcatttagggcagcctctcctctgttcttagattgttagttggtgtcatctttgtagctctccagacatttccctagtgcctgatttctctttaaacctatattgtatccctctattttattatctcttatcttgctctcttctgttcttcccccagctcaacctccctgccccatcatgtcctcctcgcccctcctcttctccccttctcattctcctagttccctctcccctccccccatgctcccaatttgctcatcagatcctgtccctttccccttctccgggggaccatgtctgtctctcttagggtcctccttgtttactggcttctctgacagtgtggattttacgctagtaatcctttactctatgtctaaaatccacatatgcgtgagtacataccatgtttgtctttttgtgactgggttacctcactcagactggtttcttctacttccatccattttcctgtgaattttgagattccattgttttttcccccagctgagtagtactccattgtgtaaataccattacaagaaagtgttagagggaaatttgcatttactgcaccaattctaaataactcacagtcagttcggagatatcagtggaaggttttacctcaggggatgctaaatagtcctactttgtgtcaacactttgtacaacaacctttggaaataattcataaaaaaatttccacaatctccgccacactgatttccaaagtggctgcatgagttggcactcccaccagcagtgaaggagtgttcccctttctccacatcctctccagcataaactgtcattggtgtttttgattttagccattctgacaggtataagatggtctctcagagttgttttgatttgcatttccctgatggctaagggtgttgaacactttcttatgtgtctttcagccattttagattcctctattgagaattgtctatttagttnnnnnnnnnnnnnnnnnnnnnnnnnnnnnnnnnnnnnnnnnnnnnnnnnnnnnnnnnnnnnnnnnnnnnnnnnnnnnnnnnnnnnnnnnnnnnnnnnnnnnnnnnnnnnnnnnnnnnnnnnnnnnnnnnnnnnnnnnnnnnnnnnnnnnnnnnnnnnnnnnnnnnnnnnnnnnnnnnttttgtcttgctgactatgtcctttgccttacagaagcttctcagtttcaggaggtcccatttattaattgttgatctcagtgtctgtgctactggtgtaatgttcaggaaggggtctcctgtaccaatttgttcaagggtatttcccactttatcttctaataggttgagtgtggctggatttatgttgaggtctttgatccatttggacttaagatttgtgcatggtgatagacatggatctatctacagtcttctacatgccagcatccagttatgtcagcaccatttgttgaagatgttttctttatttcattgtatagctttatcttctttgtcagaaatcaggtgtttgtaggtatgcgggttaatatcagggttttcagcttgattccattggtctatctgtatatttttgtgccaataccaagctgttttcaggactatagctctataatagagcttgaaatcagggatggtgatgcctctggaaggtcttttattgtacagggttgttttggctatcctgggtcttttgtttttccatataaagctgagaattgttttttccaagtctgtgaagaattgtgatgggattttgatgggggattacattgaatctgtagattgcttttggcaagattgccatttttactaagttgatcctacctatctaagaacgtggtagatcctttcatctgctggtatcttccttaatttttttctttaaagactcaaaattctagccgggcattggtggcacacacctttaatcccagcactagggaggccgaggcaggtggatctctgtgagtttgagaccagcctgatctacaagaactagttccaggacagcctccaaggccacagagaaaccctatcttgaaaaaccaaaaaaaaaaaaaaaagactcaaaattcttatgatacaggtctttcacctttttggttagagttaccccaaggtattttatgttgtttgtgacaattgtaaagggtgatgtttctctgatttctttctcagcatttatcatttttgagttaatcttgtatcctgccactttgctgaaggtgtttatcagctttaggagttccctggtagagtttttcgggttacttatgtagactctcgtatcatctgcagacagtgaaagcttgacttcttcctttccaatttgtatccccttgatctcgttttgttgtcttattgctctagctagaacttcatggacagtattgaagagatatggagagagtggacagctttgtcttgttcctgattttagaggaaatgctttgagtttctctccatttaatttgatgttcgctatgggtttactgtatactgttttaattatgttcaggtatgttcctgttatccctgatctctccaggaccttcatcatgaagggatgttggattttgtcaaaggctttttcagcatctagtgagatgatcatgtggtttttcttcttcagttggtttatttgatgggttacactgatagattttcaaatgttgaaccaaccttgcatccctgggatgaatcctacttgatcatggtggatgatttttctgatttgttctttgattcagtttaccagtattttattgaatatttttgcatcaatgttcatgagtgatattggcctgtagttctctttcttagttgtgtctttgtgtggcttgggtaccaaggcaattgtagccttgtaaaaaaaagagtttagcaatgaatctttgcttctattgtgtggaacaatttgatgagtattagtattagcttttcttggaatttctagtagaattttgcactgcagccatctggccctgggatttttttggttgggagactttctaagttcctcagaggttatagatctgtttaagttgcttatccattcttgattcaattttggtaagtgatatctgtccagaaaattgtccatttcctttaaattttcaaattttatggagtacaggttttcaaagtatgacctgaagattctctagatttccacagtgtcagttgttatgtccccgttttcatttctgattttgttactttgcatgttctctctctgccttttggctagtttggataaaggtttgtcaatcttgttgattttctcaagagccaatctttattacattgattctttgaattgttttctttgtttcaactttattgatttctgccctcagtttgattatttcctggcatcttctctggggtgaatttgcttccatttgttctagaactttcagctgtgatgtcaactctctggtgtgactattctctagtttcttcatgtaagcacttagagctatgaactttcttcttagtactactttcaaagtgtcccatgagtttggatatgttgtgtcttcattttcattgaattctaggaattctttgatttctttcttcatttcttcattgacccaggagtggtgcaattgggcattgttcaatttccatgagttggtaggttttctgcaatttgagttgttgttgaattctaactttaaagcatggtggtctgataagacacagggggttattccaattttttagtacctgttgaggtttgctatgttgccaagtatgtggtcgattttagagaaggttccatgtggtgctgaaaagaaggtatattcttttgtgtttggatggaatgttctatagatgtctgttaatcccaattgggtcataacaaaggtctgttagttcctttgtctctttgttaagtttctgtctagtggtactgtcctgtggtgagagtggggtgttgaggtctcccactataactgtgtgaggtcttatttgtgatttgagttttaataatgtttctttttatgaatgtaagtgtctttgtatttggggtagagatgtttagaattgaggctttttcctgatggatttttcctgtggtgagtttgaaatgaccttcttaatctcttttgattgattttactttgaagtctaatttgttagattctaggatagctacctcagctcatttcttgggtccatttgattggaatatcttatcccagctctttactctgagttaatgtctgtctttgaatttcttgtatgcagcagaaggatggattctgtgttcgtatccactctgctagcctgtgtctttttaaaggcaagttaagaccattaataatgagggaaattagggaccattaagtgcttattcttgtttgtttttaatttgttgtatgtggatatacccttctttttctttttggttttggtaaagtgggattatctattgcccatgtttttgtgagagtagttaatttccttaggttggagttttccttccagtactttctgtagggctggattagtggtttcaatcactataaactgagaaaacaagatattccacgacaaaaccagagatagggtttctttgcgtatctctggttgtcctggaactcactctgcctgtctccctgagtgatgggattgaaggcgtgcaccaccacctggcctggtaattatatagttttactgtgtcagagttaaaaactttcccttttatttagacaaaaggggaaatgttgcaggatttgaacacagattctgggaggttctccatgttgtcatttatttcctccacaaactctgagtatctcaacctctaagtatctctgtgacaccctgtccttgaattagggggcaaaggcaaccactaggtgactggaattagccataaggatatgatgtgatagagaggcacaggaaacagtagggagtggtttagaaagattcctggtcctttgtgacctgggaggcatggagagagagggtcggctctttgttactcctttttttttttttttttttttgatctatcaggtttttaccccaatatcagactcccacgttcttcttaataatagaacaatttagataacacttcacatagctatgtcacctgcttgaggagcggatttcctacactgctgatggagacagtgacagcagaccaaggaaaacaaacagcttggtgagctctgagctgactggtcactcacaggatcccgggtgagtccggggataaccactgacaccccaccccagtgagcatgtcactcacacagctgcatcactgcagtccccagcacagctcccagcagctccactcaacagtctcctctccctcaggaaccacagctggtttagccctgagagggaagtgctacattgtgtcagctctgtgaacctggagcttcctgtgtttcatgagcctcctcagcctcctcctggctccagcagggattctccttcattctagagggaaattcaccccatcacctccctcttctacagcagctccctttgttaaaacaacctcaggccaagtgctggtgtgtcaagtgcagccccaggtcccctcacactgaggtcagggtcacctgagctttcctctcagcaaagccctctctccctgtccccacctgcttttctctctgtgatccatgatcctatattttattcattcatcaaacatttactgggtatgaatgtttgcccagtcctggcacaggaaggcattatccttcacaagacaaagatggctgtaccatgacagagaggatcaccgccttggtcatcagacatctctgctaaggctcctgtgactctaagtcacaaggctagaaagaaaccacaggggccataacctggagcaggagatgaagtaattttcatctctggttttcccacaacctatttttaaaagaattaactttacatctgtctgaatgtatttgcaccaggcatctcaccggtgttcagggagtattggaaaccatggaaaaggaattatggatgtctatgagccaccatgtgggtggtgatatctgagcctggtgcctctgcaagagcagcaagtgctcccaacccctgagtcatctcttcagtccttggatcatgtcttttaaagaaacacaaatctgaagactcagcctgtaaatcctggagtcaccactgtaggcagcacaaggaccctgtggatccctcgtttctgaacatcctacagcccaggttagattctgaaagatgggaaagaagatgacaggcaggcgtcttggaggaggcaggagctcaggagactgaagttcatgttctcatcctacagtctcctgagtgcagtggtctagctgggccttgaggggacaaggatgaaaaaaacagattttaatgctgtcactcagggagcccaagggaaaaggaggcaagctccactctcaggaacaaaaaaaggcctaatcctccatacaaactaaaaagtcaacaataaacagggaatatggtgtaaagacctacagccaggtcagagcccaggctgacctgtttcagcagccttggctgctcacaatcctggggacaggacagggctctggccatccctgtgtctctgtggctacagatctcagcatgtggtcctaagtgatgaagagaagagagcctggaggtgacagaactgaggagtgaccatgtcacagccaacaatggactgagctccacctggacaagccatgtgcacactcagctcctacaatcccattagatggacacagcacaatgaacacagattctggaaggttctccacactatcacttatttccttcacaaactctaagtatctcaataatttatttaacagacaatcaacctgtcagatcaagaatgagaaaaatcaagttcaaattgagatccttatttacagtggggaagttaggggtgcagctcagggcagcatggaggtgacacgatggagatgtccccttctatctgctggaacaggaagggttggccacagaagggaacacaggcagtgcagggacagggtcctggtgtacagggctgggctgggctcctcagttcttcacattgagcccataggatcacagggaacatcagacactgctgcagagagtcaaccgtggatgtcacaggagagagccgtcactccgtccatgcaaggcagctatcttcacgctacagaacaagagtcataagcaatcttgtgaagacaacatcccaacaacccaccactcactcacaggtgattctgggtgtccctgaaacccaatcaattcgactttgccccccaaccccaaatcaggtcccagagtgtcaactttacaatctgagagagacacatctgagctctgggaactgtccctgcctggggttaaaatatatactttcataggaagataaaaagatggcccctagaagattttgctgcatgcaatattatggattttcagagacccaattactctagcttcaccccacaggcctcagggagaatcctgctccccacacctacctggagctggagcatagttccctccttttccacctgtgagaagaaaagctttgagagaccagggaggagccaaccctagaacttttccagaaccaacagcagacccaggttagagacaggagcaatggggtgtatgtgtgtttccacgaggcagagaacacttctaaaatggctgagagagaactcagaccctgccctttcctacctgagtttctcctcttcctcacaaagaacaccacagctccaatgatggtcacannnnnnnnnnnnnnnnnnnnnnnnnnnnnnnnnnnnnnnnnnnnnnnnnnnnnnnnnnnnnnnnnnnnnnnnnnnnnnnnnnnnnnnnnnnnnnnnnnnnnnnnnnnnnnnnnnnnnnnnnnnnnnnnnnnnnnnnnnnnnnnnnnnnnnnnnnnnnnnnnnnnnnnnnnnnnnnnnnnnnnnnnnnnnnnnnnnnnnnnnnnnnnnnnnnnnnnnnnnnnnnnnnnnnnnnnnnnnnnnnnnnnnnnnnnnnnnnnnnnnnnnnnnnnnnnnnnnnnnnnnnnnnnnnnnnnnnnnnnnnnnnnnnnnnnnnnnnnnnnnnnnnnnnnnnnnnnnnnnnnnnnnnnnnnnnntccatgtcctgagtctgttcctcctcctccctctgccaggtcagggtgatgtcagcagggtagaagcccatggcccagcacctcagggtgacatcacctttagacccaggatgatgggtcacatgtgcctttgggggatctgtgtggaagatttaagaaatcccacaagaacaaggtaaactgaaatctgcaaagacaaagttaaatcaatgatgacactgaactgtgcgtctcaacacttctgactgtcatcacactggtgacctgcagggggcgctggtccccgcatcactgatcggcacatttttcagggggacccagaagctaaaagggaatctcatgaaccagcaggtcacacggtactccctatgtgatgttgtatagcataagttaggtggtaaaagtattgaacatggaatgaaaaataatttatttataaacatgattaaatgcatatcaaagtaagaaattaagaggaacggcatacatgaagggtgtcaccaactactgctgccaccattgaggcccaaccactatggccatcttgctgaccagcataactgtctgtccaagtgaacagccctcaccaaagtgagcagcagaaatggtgtgaacctctgacactcagccagagataatgactccctaaccccagcctctgggggccaagagaagatacaagctgttgtcacccaggatccctgaaaatagctgtggagcccagtgcagcactcactgggacataggtgctcacaggggtgtgtggattttacttatcagtcaagaaagttcaactcctaattcactaggagaaacactgcaacttgttccagcagagggagagcagtgggggtttggatggttaattctggcagaaaacagtctaagttcatgggactctttcctttaatgggaactctgacttctgtgattatccagattagcagtcgcccagggaacaagaaaatgacaactcaaaaaaagaaaaagataaaaaagaaaaaaaaccataactttgagtgtttttcagtgcacccccaaagtgtcacgtgaccattcaaggaagagatagatttggggtgagggagggatgcaaacctcacgcacaggaatctgggagattgtattctgtggaaagttctagaaacctgggaatcaccctagggtcaggcatccacctctctatcatgtactggagacttccggtcctggtgtgtaaggctgacacactcagtcaccgggtgtggacagagaacccggcctggcagaggccatggctgacacagggctgcagactgaggagccactgctggggatgtgggcatcttctctcccgccctcctgagacagatctggaaccgtccagggagaaggctgagccctgggagatgagtgcagcccctgccaggctggatcaggagccccagggacactgtgtcccctcagagacaggggcgtgaccccagctgaggttctcttcttcctcaggactgagcccagcccgagggcagagggaggagatgcccgcggcccctgcacctgtgcgcagcagctggtccttcccgtgctccaggtatctgcccagagactccacgcactcctcctccaggtaggccctccatgcgtctgcaacaccagcctgctcccacttgcgccgggtgatctgcgccgccgtgtccgccgccgtcaacgtcctcaggacctcgttcagggcgatgtaatcgtcgccgtcgtaggcctgctgtccatacccgcggaggaggcgcccgtcggaccccacgtgacagccgtacatactctggatggtgtgagagcctggggggggggggacccccatcacccccccccaccgattnnnnnnnnnnagtcgcccgtcccgctccgaggccccgcccacccgcggccccgcccaccccgcaccctctaaaccgaaagggaaaccgggtccggtccccgctctcctcctcctcccggacctcggacttgggacccggggcgaccccggcccgtgcgtagggacgagaaggtcgtgacctccgacccggggtcactcaccgccctcgctctggttgtagtagccgagcgcggtcctcaggttccctcggaaaatctgcgcgttgttcttggcgttccgcgtctgcctctcccaatactccggccccacccgctgcacccacggcgcacgcggctccatcctcggattctcggcgtcgctgtcgaagcgcacgaactccggactttatacccggtgcccgcggacggtggttggttccccgggatcccgacacccaatgggttgagaaccgccaagtcttcatcagtgtccgggcagaaggagctgacacaggtcaggagctggagaagagaaactggggacaggggatccccgcgctgggcgtccccaccccggacctcaccgcctgggactaagactttgtctgaccctgtgctgcggacacagcgcggtttttcccggtgtctctgagcctcccaaggaaaatgctggtcaggttcgtcaggatgaaacctgagagcttgacgtttccagtaaaatactcgcagcacttaaaatgaatgttcacggaaacagatgctgtcgcagtcccggtgagtgcgtggggccgccgtggacactgcatggaggtgactggagttttacagctctggtcaagtccttctgacacactgtgtcatatgtgactctccgtgcaggaagcagtccctactctcctctgcttccactttctacttcagttacgtgtggcttgtatttgtgacacaaatcaaaatgcacagaaacaaaagaattattagtttgattttactcaacacatcattattctgcattatagttacagttcatctcttactgtgttaattcaataaaacaactgtgccatggaagtgtgtggacacaggaaatatggagagtagacagggatctgtgcatctatgtttccatctgtgcatctatgtatccatctgtgcatctatgtatccatctgtgtgtccatctgtgcatctatgtatccatctgtgaatctatgtatctgtctgtgcatctatgtatctatctgtgcatctatgtatctaactgtgcatctatgtatccatctgtgcatctatgtgtccatctgtacatctatgtatctgtctgtgcatctatgtatccatctgtgcatctgtgtatccatctgtgcacctatgtatctatctatagaaaggggattaattagaataactcacaggctgaggtccaactaatccagcctcagacccaagacccttggagttctatagacaggagcctgtggcaactcaggcagccatggtgctcctttaactttatcctatgtgggctcagattagtcctgttttttccccgtttctattgtgctagactctaaggcttctctttcttcttaaaaaggagagaccctggacaggctgaagtgggagggaagatgaggtggggacatcactggctacaggaactttcccgatgttcagaatgtcgtaatctgttacaattagcattcaagtgactgactggagtttgtcttgttcagcagcaattaaaaaccaactcaagagacctggtgagatggctcagaggttaagagcactgactgctcttccagaggtcttgagttcaattcccagcaaccacatggtagctcacagccatccgttatgagatctggtgccctcttctgtgtgcagatatacatggaagcagaatgttgtatacataataaataaacaaagtcttaaaaaaaaaacaacaactcaaggctcaattgcaaagataagcacatacggtgtcttcttcctggaatggggttgtgattcactgtgcacagtaggtccataaaatgaaatctttctgtgttttaaattttatagtgttttgctattttcatttcaggacagtctatttcagtcatcagtgtctgtcctgttccagctgtgacttcactaacaggtgattcaatgttgactaaacaggactgtgccctcagcgtgggtgtcacactccagatgtgtaggagagggagagggagcggagccattacagtacttttcaaaaatgtatttttaatttatatttttattaggtgtgcgtgtgtgtgtgtgtgtgtgtgtgtgtgtgtgtacctgtgtgtgtgtgtttgtgtgtgtgtttgtgtgtgtgtgtgtgtgtgtgtgtgtgtgtgtgtgtgtgtgtgtgtgtgtgtgtgtgtgtgtgtgtgtgtgtgtgtgtgtgcgcaggaagaccaggcactggctcccatggaactggagtcactgatggttgtgaaacacctcgtgtgtgatgggaactgaacctggatcctgtaaacagcaacagtgctcttaattctaagccacctctccagcccctattggaatttcacagaaggaaaccacacagcctggctcacagcaagatggctgacaagatggctgatgacagaacctggatgcaaaggaagagacagagtcagtgcagagcctgagtgagggtgctgggcattgatggatgaggcctgaggagacagagaagggcagaaaaggaggtgacagaataaaggaggaatcctaatggccctgcagggcatctcacattccacactgaatactgtgatgtttgaatgagaagggccacacaggttcagaggttcagatacctcagttctagtcaatggaactgtttggggaggatcaggaggtgtggccttgctggaggaggtgtgttgatgaggagcaagtgagaccagcaagataggttattaactggtaatttattggggagttatactcacaggaggaatcagtaaccagatttggcattccgagaagtctggtcccagatgcttccaaaggctgactgaacccggagagacagggagcctggctcttcctcaccctttatgctacacccttctacatacctgtgaccacgcctagccaggtgtggccatcggtacacatatgggttctctccctacagtgtgtcactggggctgggcattgaggttttaataaactcccactattctccatgtctctgacacttgcagatcaagatgtgagctctcagcctccactcctttcctctgccatcatagactcaaaccctctgaaaacttaagaacaaattaatcgcttcatcttatgtttctggggtaccagtgtcttataacagccataggaaaggaactaaagccaggtgtggtgacaaaaacctttaatctcatgacatgggatgcaaatacaggtggatctctgtgagttcaaggccagcctggtctacacagtaagtttcaggacagccagagtgaaggagactgaccttgtctcaaacacaaaacaaaaacaccaggagagacccaaagcccaaaacaatttatcctctcctcctacttcctcttccttcttttctgaggtcaaaccctggatttttctcaaataaagtcacttccagggatacaatgacaacaacactggggttgggatgcaggagagagatgcttccctttaaagcagaggctctggctggcaaccaccacacagacttccacagagaccaggctcctgtgtccacctgcagggggcgcacacactgccaagcctgatgctcaggaatctcccctttgctcttcactcaggatccagtcttcacagctttgtgcttacactcagactcctggtgtttcttcgaagatgaccatctgtggctccaggtggttgtgtttcacggggatcatcactccatagtcctgagattgtctgtgtggatgggtcatcatctcagcacagtggaccccttctgcactgggaagagaccccgtggatatcaaatacagcaggacacggaacctgtctactctccatatttcctgtgtccacacacttccatggcacagttgctttagtgaattaacacagtaagagatgaactgtaactaactataaagcagaataatgatgtgtggagtaaaatcaaactaataattcttttgtttcagtgcattttgatttgtgtcacaaatacaagccacacattctatgtatccatctgtgcatctgtgtatccatctgtgcacctatgtatctatctatagaaaggggattaattagaataactcacaggctgaggtccaactaatccagcctcagacccaagacccttggagttctatagacaggagcctgtggcaactcaggcagccatggtgctcctttaactttatcctatgtgggctcagattagtcctcattttaagtgctgcgagtattttaccggaatcgtcaagctctcaggtttcatcctgacgaacctgaccagcattggccttgggcggctcagagacaccgggacaaaccgcgctgtgtccccagcacagggtcagacaaagtcttagtcccaggcggtgaggtccggggtggggacgcccagcgcggggatcccctgtccccagtttcacttctccagctcctgacctgtgtcagctccttctgccgacctgagtctgctgttggttcggtggagcgggaggggccggagtattgggaaggggagacgcagagagccaagaacagagagcagattttccgagggaacctgaggaccctgatgggctactacaaccagagcgagggcggtgagtgaccccggctcggaggtcacgaccttcatgtccctacgcacaggccggggtcgccccgagtacctagtccgaggtccgggaggaggatgagagcggggaccgggacccggtttccctttcagtttagaggatgcggggtgggcggggccgcgggtgggaggagttgaccacgggtcccccccccaacctcccaggctctcacaccatccagcggatgttcggctgtgaagtggggtccgcgggtacagtcaggacgcctacgacggcgacgattacatcgtcctgaacgaggacctgaggacgtggacggcggcgcagatcacccggcgcaagtgggagcagactggtgatgcagacagatggagggcctacctggagggcacgtgcgtggagtggctcggcagatacctggagcacgggaaggaccagctgctgcgcacaggtgcaggggccgcgggcatctcctccctctgccctcgggctgggctcagtcctgaggaagaagagaacctcagctggggtcacgcccctgtctctgaggggacacagtgtccctggggctcttgatccagcctggcaggggctgcactcatctcccagggctcagccttctccctggacggttccagatctgtctcaggagggcgggagagaagatgcccacatccccagcagtggctcctcagtctgcagccctgtgtcagccatggcctctgccaggccgggttctctgtccacacccggtgactgagtgtgtcagccttacacaccaggaccggaagtctcctgtacctgatgggagacctggatgtccctaccttaggttgcttccccagtttctagaactttctaaagaatacaatttcccagattcctgtgggtgaggtttgcatctctccatcaccccaattctatctcttcctagaacggtcatgtgagcacttatagggtgccctgaaaaaaatctaaaatatgtctttttcttttatctttctttgtttcttttttgttgttgttattttgcttttgtcagtttttcttcctcgacggggtgattcggtttcaccctcccttttcattatctgtatctgtctcctcaggtgtcttgtaatctggataattagacaagtcagtgttccctttcaaggaaagaatcctataaccttagactattttctgccagaattaactatccaaacccctggtctccctctgccccaacaagttacagtgtttccccactgaattaggagttgaacatcctcagagacggggtcttctgaaaatcaaggactggagagacagggaaacccacacacccctgtgtcccagtgagtgctgcacggggctccacagctatttccagggatcctgggtgacaacaccttgtatcttgttcccccagaggctgagggttaggaagtcattttctctgactggtgtcagaggttcaccccatttctgctgcacactttggtgatggctgttcatttgaagagacaattatgatggtcagcaagatggccacagtggttgagcctcaatggtgtcagcagtagttggtgacaccctttatgtacctgtgcccctaattccttaatttgatatgtatttaaccacatatataaattatttaccatcccttcttccattcttttaccacctaacttatgctacacaacatcacataaggaagaccatgtgatctgctggttcctgagattcccttttatcttctgggtccccaaagaaaatgtgcagatctgtgatgagggggaccagtgccccctgcaggtcactagtgtgatgacagtcagaagtgttcagacacatagttcagtgtcatcattgctttaactttgtctttgcagatgtcagtttaccttgttcttgtgggatttcttaaatcttccacacagatcccccaaaggcacatgtgacccatcattttggacctaaagatgatgtcaccctgaggtgctgggccatgggcttctaccctgctgtcatcaccctgacctggcagagggaggaggaagaacagactcaggacatggagctggtggagaccagaccttctggggatggaaccttccagaagtgggcagctgtggtggtgccttctggggaggagcagaaatacacatgccatgtgtaccatgaggggctgcctgagcccctcaccctgagatggggtaaggagggaggggaacagagctggggtcagggaaagctggagccttctgcagagcctgagcagggtcagggctgagagctggggtcatgaccctcaccttgccttcctgtccttcccttcccagagcctcctcctcagtccactgtcctcatcatggcagtcattgctgttctggttctccttggagttgtgaccatcattggagctgtggtgttttttgtgaggaagaggagaaactcaggtaggcaagggcagggtctgagttctctctcagccattttagaagtgttctctgcctcgtggaaacacatcacaccccatagctcctgggtctgacctgagtctgctgttggttctggaaaattcctagggttgagctcctcctttgtctcttacagcttttcttctcacaggtggaaaaggagggaaatatgctccagctccaggtaagtgtggggagcaggattgtccctgaggcctgtggggtgaagctgtagtaattggggatctggaaatctataatatcacctgcagcaaaatcttctaggggccatctttttatcttcctatgaaagtatatattttatccctaggcagggacagttcccagagcttggatgtgtctctctcagattgtaaagttgacactctgggacctgatttgggatggggggggcaaagtcgacttgattgggtttcagggactaccagaatcaccgtgagtgagtggtgggttgttgggatattgtcttcacaagattgctcatgactcttgttctgtagcgtgaagacagctgcctggcatggaatgacaacgtgttcagccctctcctgtgacatccacggttgactctctgcagcagtgtctgatgttccctgtgatcctatgggctcaatgtgaagaactgggagcccagcccagccctgcacaccaggaccctgtccctgcactgcctgtgttcccttccatggccaacccttcctgttccagcagacaggaggggacatctctatcctgtcacctccatgctgccctgagctgcacccctgacttcccctctgaaaataaggatctcaatatgaacttgattgttctcttccttgatctgataggttgattgtctgttaaataaattgttgagatacttaagagtttgtggaggaaaaaagtgatatcttggagagcctcccagaatctgtgttcattgtgctgtgtccatctaatgggataggatgggattgtaggagctgagtgtgacagggctgtgtccaggtggagctcacccctttgttggctgtgacaaggtcactcctcagctctgtgacctcctggctctgttttctccatcacttaggaccacatgctcagatttgtggtcacagggacacagggatggccagagcaatgtcctgtccccaggattgtgagcagtcagggctactttgacaggtcagcctgggctctgacctggctatagctctttatgccatattccctgttgttgactttttagtttgtatggaggattaggcctttttttgttcctgagagtggagcctgcctccttatcccttgggctccctgcatgacagcattaaaatgtgtttttccatcctttcccaccaggacccacctaggcccctgcactcaggagactgtaggatgagaacatgaacttcagtctcctgagctcctgcctccttccagacccctccctggagattctctcattctttcccatctttcagaatctaacctgggttctaggatgggcagagaggagggatccacagggtctcatctcagatctgtcctgttgggtctgtgttctgcccaaggtctcctccctccttagctctggaagttctgatgctgcctccagtggtgactccaggatttataggctgagtctcctttagatttgtgtttatttaaaagacatgatccagggactgaagagatgactctggggttgaaagcacttgctgctcttgcagaggctccaagctcagatatcaccacccacatggtggctcacagccatccctaattccttttccatggccactaataccctgaacaccagatagactggcaagaaaaacactcatagactaaaattaaggaatcttttaaaaagtagtttgtgggaatgccagagatggaaattacttcatctcctgatccaagttctggcccctgcagttttctattctatccttgtgacttagttccaggtgctctaagagccttagcagagatgtttgctgaccaaggaggtgatcatctctgtcatgatgcacccatctttgtcttgtgagggatgatgacttccagtgccaggaactctgaaaatattcatacccaataagtgtttgatgaatgaattaaaaattaggatcctagatcacaaacagagaggcaggtggggagagggactttgctgaggtgaaagctcaggtgaccctgacctcagtgtgaggggacctgaggctgcacttgacacaccagcacttggcctgaggttgttttaacaaagggagctgctgtagaagagggaagtgatggggtgaatttccctctagactgaaggagcgtccctgctggagccaggaggaggctgatggggctcatgaaacacaagaagctccaggttcacagagctgacacaatgtaacacttccctctcagggttaaaccagctgtggaccaaggagagactcagacttcacagtgcctggaccgctacagcaggtctcaggaaaggtgtctcctcaacggctgcaaggaaaagcagcagccatgctctcctgcaatggcctcactcatactctcctgtgtctgtgtcagcctttaccccaggctcacctagggctcatcacagcttggaggtactcagtgtcatctgtcacccatagttacaaaagatgtcaaaagtacaaccccaacacacacattgttggtacctgtcttctcttttcctgtagcagcttgtgttcctgagggcaagcatctggctgggccattgatgcagtgtctctgcatcggtggtgtgagagttattcctctcacaccaccgcttgacaatggcaccccagaccacacaccccagtcttcacagtggggctctccaggtagcatcagagtagaaggctcagctgttgtcatgagctaagtggtgcaggagctcatgttccctaagtaaaaataaatccacacaccaccaccccctccttccctttaaaagagagtgttcacgttgcaacttttcccttggggagacacacttcagggcttgacttttgcactgattttaactgtaaaatgcagacttaccttctgctcataaaaatggagattaaatctgctggcccctctcattttaacagacctgtgggggacactaatgtttgatatgagttctctgtcagttaagttattggtgaagtaagtgattagtagacattctgtgaaaccaaatattcttggttacaaggaatcccacaaggttggttcccggcccagttctttttttatttttggttttcaagacaatgtttctctgtgtagtcctgactatcctggaacacaatctatagaccaggctggcttcaaactcacagagatccacctgactctgccttccaattgctggattgaagacatccaccactacctggcacagcatcagttcctttggttttttaaagattttattttatttattatgtatacaacattctgcttccatgtatatctgcacaccagaagagggcaccagatctcattacggatggttgtgagccaccatgtggttgctgggaattgaacttgggacctctggaagagcagtcagtggtcttaacctcagagccatctctccagccccctcagcatcagttcttaacacacttgaggacaagaaggtcatcagctacactgtgaattctgctctatcctcagttaacctataatcatgttctcaaactgtcagtagatactgtgctgttggacccatgaattttctaattaaattgtacatgctataatatgatttttacatgaatgatactctgtttaaatgccagtattttactccagttactgtgtaataggtacactgtcactgaatgaactttgaatttaaaaatcaagttagcattggttacatattatccattacaaatttgtacagccttgtatacaggcaagaaaagaaagaatgaaaatggaaaaaaaatcttttttgttaatggaaggtgttaatttaaaaacagcttatccaagctgcctggtgctggtggtggtgcacacctgtaatcccagaactcaggaggcagaggcaagcggatctctgtgagttccaggccagcctgatctgcagagtgagttccaggacagtcagtcacagctgttacacagagaaaccttgcttctgaaaaagaaaattttatccaaactgaatgtgctgcttgtatagtggaactccaaaagctctcttttttaaaacataaatataatcgttgcatttaatgttatttttgaaaacccaaaacatctaaatccttactgttgtaccaaacaatgtcagttcaaattacagaatatgtatatcaacaccagctggaaagagaattcagggcagtataaagccctactaaaatttgtctaattgatgacaattgtttacggagaactgaaccttttttttcccctgaactcagagcagcatgccacaatagacacaaaagagtactagaattattttgtaattatgcacgctgaataaaagcaaaatagacagctgagttcttttaccaaatgctttgttggcatatgatgattgacaaaatattagcatcttcgtttctggactttatgaccacctatagactgcatctttgaaataggaagaaaacagaaagattctgcattcccatgatggtaaagccgtcttactcagtgcaggtgcaatgtacacctagtgcaagatgctccacgcccacaggcgtgttccttttactgacttcttaccatctgcttggatccctcacagaaggacaacactgtcagcattaataattagcagcatgtccaatactcatcttgccttgagtaaagaagcctaacccatctcattggtgtagcaatttccataagatcactacttctctgcatttcttttgagaactcccagagacttcgggaatcttttttaagcaataaaaggtacagagtgggttcaagtcgggcagggcaccctggctcagttcccagtatgaagggactgaatccagtcccctagttctcagcttgcagaaggaggaagttagggggggaaatgcagaaactatcctgttactgagtagcatatgaagggagcaagtggataagagaagacacagtcagcagaaactaggatgtctaaggtggtagggagaaacagtccctgagtgcaattagcatcaattcaagcgtcatcaagaggacatggcaggggacaagctggaaccacagcccttcaagttctcaggcttacagtgctgtggttcaacagcctgtggaaggtggcatgagccagggattccaccaccattgcatgcaaacaggcaaggatagcagcacatggctgccgacccactgagagtgtcgactcaacgctggtggaaatccagtctgttcctgctttcacacctgcagagccacagcttcttttcaaaggcaggggggagcgtttcttcttcgtgaattttttctacccactagagtttcctcgttacttcatcacttacactagaaaagatgctgcaagctgtgtcagctagcttctaatctggccagggcaccaggacgacacgcatgattgagtgaacgaccatgtcttcttggttcttctgatggcagcctcagtatgctcctttggattgaataggtgtggtcttgtttgatcaaagtgtgtaaacaagcatatttgttttgttagtctccatcccagagccctttggagcaccccgaggctctgcagtttgatgactaagttttgcctcacccttgtacagttgctgtggcttggcagcaactgctccagttttgacatcttcctgttggaaataggtctcacctgtgttgccatcaatccccagcacctgaggcaggttaaagtccaggttatagacctcccgctagtaggtgaatccttcgttggctcagatggtctttcagtgtctcaaagggaaattcacactgatcactaggtccacatcacagattctgtcccaggctcctgtctgtactaaggtcccccggaagctgtctagtagccggtgttgtgtgctccaggtctccatttctgacaccattaggcgcgtgatcacatgatctggaaccaaaagacctttttctagatactgttttgctttgtcaccaacttccgtgctggccttgaggttctcctaaaagaagtggctgcttgaaagatgctggaaggtaaagttttgggcaatccttaaatatggtgcccttaccccagcccagaaggcagcctgactataaccatgctcaggagtttggaagccatgtctttggaggggaggaggtggcctggaccacagcaggtacactctgtccaacattccctgcctctgcaccctctgctcacggggattcccctgccacccttttctaccataaaatgattctgctggaaatgctaggttgagagatctggtgaattctacttaatgtaacttctctatagcaaacaattgacttagatttggaacgtgttacagaacacagcgttatcattacctttgtgttttaagtttggatcaccaacatgttcaggtattgtgggttatccctggcttcctggatggcccataacactttatggtaagcagtgtgtttgtatcctgaaaatgctctgaaatccatgcaagtgcctgccctgcaggttcccagcccacacttctcctccaggctctgtgagaggcttgagttgggaaagctttgcactgactttgtttttctccttcttcctcagaccctgctattccttctccatcttctgtgttgtttctctgctgtcttctccgtttgtgactttctacttcctcaggacttctgctccccaggctgcatctccttccccttcccaggcattggtgtgttcttgccaggtgtgtaagtcagatggttctcaagactgaagactaaaaggtacactcttgtaaccactaagctcctgggaaccctgtgctaccatctaggaaaccaaaattaaacggttctctcttgctggtgactatgtcattacagctgacgctatccatgtcctttaaatgtcagttctcggctgttctggagaattctgttgcttttccacatccccattgctccttcaacctttatacttgtgggtgcatctttatgccaggaagtccaagactccacagattggctgcttcgtctgcaagatcatcgtgtaggaacgagaacaatgttgctaggcaagtacaaatattaaataaaggaaaatgaatgatggccatggtaagaatcaaaacatggccgcccctccctgagggtcttgaccagcgggtgtcccccatctattctctagcttcccggtgactgactctggggggagccagctgctgcctgcagagcagcctcaagagagacccagacaagtaggaaaggactcctggggacagtcagcaagaacctgagctctttccagctgccatagaaggaagtcatatctcatgtgggcctggctctaatgaacacagtattcaattcattttatttctattgtaagtattcagggcaaagtcgtagttccctgggctcttgaggaagcccagagcttcacttctccagcctctaacccatgtcttgctgccaggactgtgaattgttggcagttctcacctcccttgggtggagcaatcctgcacaatgattggtggagcaaacctggacaatgattggagaaagatgggtgggaccagtgttacaaagcctgcacagactcagactttccccagaactcatggttcaggccgcctctcctcacacgctgctcttgctgcgggcggccacccaagccccattacagcgtgggtgagtgtggagtcgggagagaaatggcccctgtggggaggcggggagggggggcaccatgaagccttgtccagcatcacccagtcaaatcttcccgccccttccccacccgcgtccggagccccacgcccttctccctttccagccagcacagtccggggaggagggtcggtgtctcactacgcgcgccgcgcccaggcttgcactcgctgcggtatttacacaccatcctgtcccggtccggcctcggggagcccgggttcatggaagtcggctacgtggacaacacgcagttcgtgcgtttcgacagcacagcgacgcggagactctgagcatggagccacgggcgcggtggatggagcaggagggaccagagtattgggatcgggagacacggggagccaagatcaaccagcagacgtttctagagaacctacataccctgtctgcctactacaagcatagtcaccgcgggtcagaagtcaggatgcctccaagtcgccaaggtcaggccccaatcgcccaaggtgccaggtcccaagttctgcccaagacccagtgtagaaactggtttcctattcagtttagaggagatcatgggtggatggggccgtggaacccagctgaccacggggatggggccaggctctcacaccatccaggtgatgtctggctgtgaattggattcaaatggaggcctcctccgtggatatgaacaattcgcctacaacagtgacgattacatctccctgaacgaggacctgagaacttgaacagccgcggacacggaggcagcacagatcaccagggtgaagttggagcaggctggtgaggcagagagatacagggcatacctggagggcgagtgtgtggaaactctcctcagatacccggagaagcggaaggccaccctgtgctcaggtgcaggggccaagggctcagtcctgaggaagaagagacctatctgttggggtaatgtccctgtctcttctcttgtgtttagattttttttaaactttgttacaagaagagttttaaaagaaaaagctacactccaaaattaaccagagcaaagtctatgcctctcagtaaacgtccttacagttagagtagccattctgaaactgtgtgtgttcacactggatcttacccgttcactatcaaatatattttgatgcatttatcaagcaacaacagaaaaaaaaatccttaccagatttagaactagaaaacaattatatttatatcctgcttcttacctcaaatccattacctgcatttaattgtgattttattctgtgcccacttgtacattcgtttactatgtacttaccttcagggctaaatatcacttatgaggaaaatgtggtctttgggaggggggggttgtggtttttctttgtgtgtttcttttagttgattttttctttgttttggatttggtttggctttgtattgagttcccccctcccttgtctccctaaccccagccaagacagggtttctctatgtatccctggagtcactctgtagacaagagacaattctgttcacctgaactcatagagatcctcctgcctctgcctccagggtcctgggttcaaaggcgttccccaccatgacttgtggtttctccatcctgttgcctccaagctgccatgaactgcaggtcctcacttcccactgaaaataaaaatctgaatgtgaacttgatggttcatgtccttgaccgagagactggcagttcaaattaaaggagagaattctgaaagtgtgatggagaaaataaatggctcatggagaaccctccagaatctgtgtctgctgtgctgactgtcaggggggacaggaggagtctctgggagctgagtgaggatggggctaggccaggtggagctcagtccatgggggtttgttgtggtcaccctcagctatgtcctccttgggacttttgtccttgtcactttgtataaccacatgctgacagactctgaccacagggacacagggctggccagagccttgtcctgtccccaggatgatgaacagccagggctgatatgacaagtcagcctgggctccctcatggctgtggctcttcacctggtcttctgtgtttaattcttgtctctggagttcatgtggaggattaggcccatttttcttcctgctaatagggcctttctcagtatcctatggagtccctaaatagtggcaggagcaggtgttttccatccttgtcctctccaggtccagctaggcccctgcactcaggagactgtgggctgagatgatcttcagtcccctgagctcctgcctccttccagagctgttgcttggaggttctcctgccccaccatctttcagaacctaactcctgtctgtaggatcagcagaggggatgggtccacagggtctcaacttggaacaggtcctgtggggcctgtgtcctgctctgcttcattcacaacatgacacacagcctcactcagaaaacatgcatggcaggttcccaaggtcatatctcaagtttctggtcctgcgggaaaacagctacaggtggttctgtgtaggattctccctctcacaccaacacgtgctaaaggcattccagctttgacaccatctccacagtggtgtgctccagtgaaaggtcgtgttagatttagaaggctcagctgcagtcatgagctaagtggtacaggggttcaaattctgtaagtaaaaatacttccacacactaaccccagccctctgtttttgttgttgttttgttgtttcagatttacttattatacatacagtgttctgcctgcatgtatccctgcaggccagaagagggcaccagctctccttacagatggttgtgagccaccacgtggtttctgggacttgaactcaggacctctggaagagcagccagtgctcttaacctctgagcctctccctgtccctctctccctctcctcttcttcctccccctcgctctccccatttcccttcctctccctttccctctccctctctctacagagttttaacattagaacttttctctaggggagtaatacatcagggcttgacttttgccctagttttaactgtaaaatacagacttaccttctgctcataaaaaaggagatgaaagctgctgccccctctcattttaattgacctgtggggacactagtgtgtgcagtgagatctctgccagtgatgttattggtcaagtaagtgatcagtaggcattctgtgaaaccagagagtctttcttggttatgaggagttccaagggcttggctctcagcatcagttcttaaggaacttaatgaaaagagcatctcagcctccctgtgaactctgctctgtcgtcagtaacctacaatcaggctctcaagctgtcatgagatactgtgctgttgggaatggtgaattttctaaacaaactttacatgctataacatgatttttacaacctagtacattgttttactacaatttcaatataaatgtacattgtttttgagtgaccttccattttaaaattaaattacttttagttatgtactatattttgtaaacaaatatgagtttgtataaaggcaaaaaacaagactttttaaatggcagacaataatttaaaaaacaacatataggaattaaattaaatgtgctgctggagaggctactctgactattttatgggctttcggaaaactactccccacactgggtcgccttgtccagccttaatatatggggaggtgcttagtcttaatgcaacttgatatgccatgttttagtgatactcatgggaggcctgccctttcctggatggaggcagaagaggaaaggatgagggagatctgggggagatgagggaagggactggaaggggaggatggggaaggctgtggttgctatgaaaaataaataagaaataaattaaaaatgtgctgctggtctactgggaattccctagctttctttagtcctggcttggaaacatatatgtcaaatttctgtaacctgtcttcagccaagaattttgctaactcatatctgtttacagtttgtataaagtaaaacaggagtgtgtaactgcagcctggtctccagagcgagtgccaggataggctccaaagctccacagggaaaccctgtctcgaaaccccccccaaaaaaaagaaagaaagaaagaaagaaagaaagaaagaaagagagtgtgtaactgccctgagcaagatggttttgctcattttatgtgatgcttgccaaaataaatgataaatggcttaaatttaaagaagagctttattacaaagatgctgtcaagaacactcttatgcgggcagtggtggcacactgatcccaggcttctcagcaacttctcacctcacccctccccaaacctctccagcccctgagctttgcttccctccccagcttctatttcctctacaacccagccatttggccatgtgctttccattttggctccactccaggtgctcttgacctctttggctcttctccctctcctggttccctctcttgtacctctctcttcttctctcactcttcctgtcccctcctctcatggaccagtggtttttgttagttggttgattggttggctgattgcttgattgcttgattgcttgattgattggtttttcaagacaaagtttctctatataacagctctagctgtcctggaacttactctgtagaccaggcagtcctcgaactcacagagatccacatgcaactgcctcctaagtgctgggattaaaggtgtgtgctaccacctcccagtggtctagtgtattctgatggccatgttcaggctggactcttccaaaggcctctggctgttctctcccttacatcttccataagagtcttctcaacggcccaggagtggtcatgtcctcattgtcattcactgccatccacaaccatttagctattagactttcacagtccactgtgaccagtttctcacacaaggaagcagtgctgggctccttccgatgaccctccttaacaaccagcctggctattcaccttcccctggtcagtccatcaaatgctaaggtcagtgaagggactctgctcaagttattagggttccccttcagctctctttaatctgagggactgtcctaatcaggacaaatcttaaaaaaaaccaggtccttctgtgcccacacccacagtgtaataattctatgtgggagatttccttcactgatcatagcaaagagctctgggtccataaagagttaccagaagtccctctctgctccttcctgactgccagcaaagacagggacctcaacctggaactgagaagcagaacccttctgcaagttccctgtgggcttggagaaccctaaggtgcaattgagacacagcctccccggagtctccatagcgcttgctgaacaactttgcaggtttattgagaaaacatatctcgctggtcctttaattccagctctgagtaaacagaagcagttggatctctgtgagctagaggccagcctggtacatagagcaaatttcaggacagccaagggctacacagagaaaccctgtttccaactcccaagaaaaagcaagagaagaagagacacagagagacagagaaacacagagagccagagaggcagacactcgggccacaggggagaaagagagagagacctatctccccactaaattcccagaccagctctctgttgtcctcacaccccctgtcatttgttttcttctggaagagtccttgtcccaggagggggtggagtgcatctccacagcattgaattagagagggcctgagaatagcctgcagtctcccctggattccacacacacacagcctctgaacaggactttgagaagacaggttgaccaacaggcgctctttcagggaagtcacagcagtctgaggggggccacgggtcgatctgcctgagtttcactttcaacctctggtgagattttctgcccagacgttgatgacgcgacaccgattctcactctcatttggagttgggctctgagataatccaatcactgtcgctctggtttgtaaatttgcccaagatctgcccagaaccagactctcagtgtccccaaggatgggggccactgtgcaccctgctctcctcctgctgcttgcagaccctgtgttctgggctccaacccgcgcaggtgagtgccacccaggggaaaaatggcctcggcggcaaggggtgggggcggcacccgggaagccgcatcttccaaactctcagccagaactttcagatccattctccacctgcatccctagacccgtgccctgctcccttaccagcccggtgcacctgccaagaggtgcgggtctcaccgctcaccgcccccaggctcacactcgctgctgtatttctacaccaccgtgtcccggcccggcctcggggatccccggttcattttcgtgggctacgtggacgacacgcagttcgtgcgcttcgacagcgacgcggagacgcccagagtggagccctgtgtagggtggatggaacaggagaggcctgagtattgggagctgcagacccagatggcctggactcaagcaaagctgtccggtgggagcctgatgaccctgcttcgctatttcaaccagagcaaggacggtgagtgacccagacactttgggagcaccaaggttgtccagattcactggactggagtatcaccctagacctgcccggttcgttaagcagaaaagggcccgcagggattcgcttggacttggtctgaagttagtggtgctgcgcttcctaagagggctgaccaccttgtccccgctagactctcacacgctgcaggggatgcgtggttgcgacgtgggggcagatggacgcctgctccacgggtacaaccagctgggctatgatggagaagattacctcaccctgaacgaggacttgagctcctggacagcgaccttaggtcagatctctcagggcaagttaggagaccacttgaaggacagctgcgtggagacgctgcacaaacacctggaaaaagggaaggaagtgctgctgcgctcaggtgcccggggagccacaccccgcccaagtttccctctggctgcttgctgggagtttagagagctgggggtgcctgcatgggcaggatgagagcacttggggatagctcacaggttgagtgctgcccagcaggacaggttctgggttagagcctttccttttccggagggggaggagagggaggcaggtgaaccagagggccttagctcactcctccccagagtccaaggaggcaggagacaacttggttccaaatctttgaccaagaatgaatccctcagaggacagcccttctcttactgccagtaaagaaattcattttccctaacagtagaccaaccttttagtaactgatcaacagttcctttacttgggcaatggacctggacccataggaggttttttctctcaggcctcctccagtgtatctggagtctggatcctgcttttctgagtctcctggccctccctcagctcaggaccagaaaactcctcccatccatcagtctgcagagccctgaagccccctaccctagagcaccccaaagaacagattacccccagtgcctgctctacttggggtctattaatatatggacacctaatcccaccccagttctgctgtccattcctagaatggtcacatgaacactgctgagtccccaggaaaaagccagatgcctgatcttcccaactctccccctcagaccccccaaaggcacatgtgacccatcatcctggatataaaggtgatgtcaccctgaggtgctgggctctgggcttctatcctgctgagatttccctgacctggcagttggatggggaggacctgatccaggaaatggagtttgtggaaaccagaccagcaggggatggaaacttccagaagtgggcagccgtggtggtgccttctggggaggaacagaaatacacatgccatgtgcaccatgaggggctgcctgagcccctcaccctgagatggggtaaggaggaagtgggtgcagagctggaggcagctgtagtcagagcttagaactgggtggtcctcatctccccctcctttcccagagcctccttggaacaagaaatattggtttctcctccttatcctcatcctcatcacagtttgggtgctttgcatatgtaagaagaaggatgcaggtaggatgctgagtttacttgtcccactgagggcttcaagccataggtggcagtgtcctgcctaggtaatgggatgtaccatccacagctctgtgtctccttcatttgtgacctttttgtttaggcttcaaaagtagagaagggaagatttgcttgggggatggttctggtgactgagatctcatgtccagctgtcgcaagcagaggtctcactaaggacaaacctccaggaagctattacaatgtctcagttctcgaaatttcccttgggctagggactaaggttcccaaccctttggaggtcacattaagatatccttcgtatcagacttgcattatgattcatagaagcaaaatgacagttacgaagcagcaacacaataattttatggccggtggctcaccacagcatgaggagctgtgtttaagggtggcagcatgaggaagtgcctgctcccatgatacccatacatggatttctttcctcaggtgggagaggaaggagccacactcaggaagaaggtaagtgtggtgagaggtggtgtctgagactcttggagtccatgagagctcacccagcccatagtcccccctcaacctccagtcttctgaagcctgaccaggtcctgctctgttctttcctaggcaggaacagtggccaggactctggtgagacggccgtggatgatgaggtgatatgtggggaaagacagacgacacaggttggggctggagagagtctttgcactcagacatttagagtgaggaggaagctattcagaatgtcaccactataccgtgacatctgccttaatcttgtaggagatggtcattctctctggggagcctgagccctctcggaatcgtccagaccactccttcagactgagtgatctgtcattctgaaaaggtatctgattgtcctccctctactctgtggcactcagaagtctctgcttagtcttctcgctcagggacacccccacttccccgccctctcccacacccaactccatgtggaagtgcctggaacagctactacagaatggaatcttttgttttgttttggtgacagggtttctccatgattcagtcctggctgccctgtaactcactctgtagcccaggatggcctcgaacccacagagatccacctgcctctgcctgccaagtgctgggattaaaggcatgtgccaccaccatacagctcagaatggaatcttctgttttgtatatcaccagacatcttcacagtcaacttgactggacttagaatcacctagaagccgcccctctggatgtgtctgtgagggtgtttctagccaggtttaacccaggaggaagaaacaggttgactgtaaggtagcttcactcacagctggagtctgaagagaaagccagcaggacactggagtcccccttcctgtgtttcctaacaggacatgagcaggccatctcctgccaccatgaacagagacaggtcccacttttctgtcttgaacatctgacacctgtctcttccctaagtggcttctcatcaggtattttttgtcgcagggcacagggttagacacaaagctccttccccacatccaaggcttcctgagcatcactccctaatcttttagagactttcactcaggccaaactgggatctatggctttggtgcggaaaaggattatggactactagagctggtgtttaataaacatgtttctatttgtttttaattttaaggtggcataaatccatttatttattgtgtgtgcatgcgcgtgtgagagaaccacagctcatgtatgcaagccacaggacaactagctgtagtctgttctcttcttccaccatgtaatccagggacggcactcggggatgacacacctggaggcaagtgacttcacccactgagtcatctagctgtcccaataagggtctgatcatttatgtgttactttcaagaggcttacattaagtagaaactctcagagaacacagcctgcatctctcgtgggtctcttcctggcattttcccccaggtttcccttcattctctctgccaaaagtttaagatgttctgaaacctcatcctcattttccttagcgcgttgtttctccagaacagtccatctgtgtctgtgttacaggatcgcatggagtaacaggtgctgaatcttggttgtgttggtcctgggcttctcacattctttatgtacattctgacaatgtattggccaacgtcaccagcttctttagaaagattgaaaagctttcagattctgcagctctcttgaaccacacccactacaaccatctacaatgagacctggtttatcccagcactgtccccactcatgatgctggatgtctgcggttgttagtttttgtcatcgctgttaccggatacccaacaaaagcgacttaagggaagaaaggcttattttggctggttccaggagatacaggccatcatggatgggacagcatggtgtcagggacagaaggtggccggtacagcgcagtcaccatcaggaaagccaggggttgagttctttgtgcagctctctctctctctctctctctctctctctctctctctttctctctctctctctctctctttctctctctctctctctctctctggggaatggtgctacacttattcccaccacctcaattaacctaatctggaacctctgtcacagacagatttgtgtcttaggtgattactgacaccccctcccagttctcccttcttttcttttctttttaatgacatttatttattatgtatatagtgtgttgttgacatatatctgcacaccagaagagggcaccagatctcattataaatggttgtgagccaccatgtggttgctgggaattgaactcaggacccctggaagagcagtcagtgctcttaacccctgagccatttctccagcccctctcccttcttttcaatgtgcccctttcccctgttcctagactaggcttataccatttgaccctgcttggttttctcctttccaggaggaacatcaatttaagtccagctcagactacattaaaagaacctgtttcaaatattaatgattaactaaatcaattaaacctcctgaatgattcattattatggaccttattggaaaagagacccaacagtgttggaggcaagtctatcgcatgcctgcagtgcccaggaggccagaagagggagttacaggcagttgggagctgctctgtgggtgctagggatcgaaccctgcccctctgcaagagtatcaagtgctcttaaatgctgagttctcgctccaccctcaaactcagtgggtttttttttaatatttattatttattttaatgtataagtgctctttctgcatgtatgcctgcaggtcagaagagggcaccagattccttacagatggtgtgggccactatgtggttgctggaaattgaactcagacctctgaaagagcagccttaaccactgagtcagctctccagtgcaccgccccccccccccgggggtttttaaaaataaaaaaaaaaaaaacnnnnnnnnnnnnnnnnnnnnnnnnnnngggtcaagttataattaaccatctaattatacttatgtggttatactgtaatatataagattccatggaacagagtatttaaaagaatcctcctgccgggcgctggtggcgcatgcctttaatcccagcacttgggaggcagaagcaggcggatctctgtgagttcgaggccagcctggtctccagagcgagtgccaggataggctccaaagctacacagagaaaccctgactccaaaaaccaaaaataaaaataaaaataaaaagaatcctcccacagaccggagaggtggctcagcatatacctagttcttacaaataacctgaggttgggatccagcacttacaaggagttcacagtcacctctgactccagctccaggaaatcttctgtcctcctcgggcactgcgctcatattcacacacaaaaacacacaaacataattctaaaacaaattaaaagaaacagagcttacatagactctacaccaacactcagaaaaacactgtgcccaagtgctacaagagccaggggacatgggtcaggttgaagtcccaggtcttgtaaggctcttaaccgtattttctttaataaagacgtcagagaggtgccagcactggttttccatacaaggtttcactttctctctcaactctggccggattcttctctccggacacaaatgatgcactcacaattctcattcttgttggttgtctagtttctaaagaagccaatcagcgacactgtttgctacgtacaagcagtcaacaggaacaaagttcacactttcctaggcccccggtaatgtggaccatggcttctgtttccaggctccagctcctcctgactcaagttgccctagttctgatccagacacaagcgagtgagtaagggagggacgggggagcgaaaagggctccgcgggaaggatcaggacgccaggtggggcaacaataccggaagcgaatctcctcacccctgtatctccgcgtccctcacccctgtatcccctgtcttctcgggggaccctgagcccgggaggagggtcggggtctcaccgcgcgccgcccccaggctcgcactcgctgcggtatttctccaccatcgtctcccggcccggcctcggggagccccggttcatctatgtcggctacgtggacgacaggcagatcgtgcgctacgacagcgacgccgagaatccgaggatggagccgcgggcgccgtggatggagcgggaggggccggggtattgggaaagggagacgcggaaagccaaggacacagggaagaacttcagatcgaacctcaagaccctgctcggctactacaaccagagtgacgatggtgagtggccgcggccaggatcacacacaggacccctccacgtccccggggaccgtcctgggtcatcgtgacccgctgctgggccgaaggttcatccaaacgcctgcccggagcctcaaacgggaaagaccccgccgtgtcgcttagggtttttcggttgcacttttgtttctgaaaggtcgggtagcgcacggacagtggggcgggatgacaggcagggggggggggcccnnnnnnnnnnnnnnnnnnnnnnnnnnnnnncgctgcagtggatgtacgggtgcgacgtcgggccggacgggcgcctgctccgcgggtattgtcaggaggcctacgacggccacgattacatctccttaaacgaggacctgcgctcctggaccgcaaatgacctggcctctcagatctctaagcagaagtcagagaacgtagacgaggcccaccaccagagggcctacctgcagggcccgtgcatagagtggctgctgaagtacctggagttggggaagtcgactctgctgctctcaggtacctggagactcctccccgctttccctccggagtgtgggcataaggcttggacatgctcagaggatgaactgtccagcaggcgctggactgagggagaaggagagggagactccgggttgtttttctcctagggagactaatcctttcacagcacgtcagccttgatgatggccctggacccacaggagcttttttctctcaggcctcctccagtgtttctggagtctggctccagcttttctgagtctcctggccctccctcagctcaggaccagaaatcccttcccttccatcagtctgcagagccctgaagccccctaccccatgctgtcacacccatatcctagagcaccccaaagaacagattaaccccagtgcctgctctacttggggtctattaatatatgggcaccctaatcccaccccagttctgctgtccattcccagaacggtcacgtgaacactgctgaatccccaggaaaaagccagatgcctgatcttcccaactctccccctcagaccccccaaaggcatatgtgacccatcatcctggatataaaggtgatgtcaccctgaggtgctgggccatgggcttctaccctgctgacatcaccctgacctggcagagggaggaggaagaacagactcaggacatggagctggtggagaccagaccttctggggatggaaccttccagaagtgggcagctgtggtggtgccttctggggaggagcagaaatacacatgccatgtgcaccatgaggggctgcctgagcccctcaccctgagatggggtaaggagggaggggtgcagagctggggtcagggaaagctggagccttctgcagagcctgagcagggtcagggctgagagctggggtcatgaccctcaccttcccttcctgtccttcccttcccagagcctcctcctcagtccactgttcccatcatggcagtcattgctgctctggttctccttggagttgtgaccatcattggagctgtggtgttctttgtgaggaagaggagaaactcaggtaggaaagggcagggtctgagttctctctcagccattttagaagtgttctctgcctcgtggaaacacacatacaccccattgctcctgtctctaacctgggtctgctgtcagttctggaaacttcctagggtgagggacttccctggtctcttacagcttttcttctcacaggtggaaaaggaggctatgaccattttgtaggtaagtgtggggaggaaaattgtcccttagggtggagctggagctgatggggagcccttccagccacatgctctcagtctcctaaatgcttggtcatttcttcttctgcaggcagggtcagtgccgagagctctgatgtgtctctgtaggtttaaaaaggtgactccctggggacttgggattggggttgaggcagaggggagaggactgggtcccagggcttctcagattttgacatttaatgagtcttggtgggactctgagatgttgttatattggctattcatgactcttaatctttagcttccgacagctgcctcctggggacaggttctgactcaagaaacaacaaatgtctgaagctgtctgctttctcctgtgaggacgatgaaagatctggggagcccagcttgcctaacagcatgctgaccctgggatttatcagaagagtgacttcttagtgtatgtcgttgtggtgaacataaacatgcttccacagccagtgctttagctaaggcttcggcaaattcaaaatacaccagttcccaggatcagaaatgaaatagtgttagtgctgctttcccacctgcaaaaaaacaaacctggcagataacattaaaaacattactccctgtctcaataactggctttctgcatgtgtttctaaccttatttttatattatgaaattcaaggttaaactaactgtttgtgcagagtagaagagtgtatcttaagatctagggctctcgggggctggagagatggctcagaggttaagagcactgactgctcctccagaggtcctgagttcaattcccagcaaccacatggtggctcacaaccatccattatgagatctggtgccctcttctggtgtgccctcttcatgtgatatacatggaagcagaatgttgtatacataataaataaaatctttaaaaaaaaaaatctagggctctctctaggccactgtctcttgccctgtgtctttctgcctgctttgaagattatacatcagggaagccaactgacacccaagcattgccatgattttatggtggatgtggttttttcaattagagcgaactctaattggcctttataaaaacccagaatcagatataatggtgaaagctgaatgatcagagaagcagagcagccagccactggttcttacctctactgaatcctcagaccaaagggaagatcctgtccctatgaaccctcagagtgaatgctgtcttgacggaaaaccttgtgatttcttatgtgtttatagaagggctctctctgtctctattgtttatttaagaaatggaatatgaccttcagtatgcagctcttacattggctagggttcttcggtagagagaatttttaaagaatccagtaataaacaaagttactttcagatgtgagcctgtcttttcactaaaggcctttttagatagataagaatttttccctaaaccttccctatcgtgacccagcatgtctcagccttagtccatgaggttctatctgagtgggggtgtgtggactggaagctccaagcaacccaacgtcaataaagaccaaacacaggcatcttgtcatctttagagagctctcaattccatgttgtggaactagagtcatttctttattagccatcttttctggtgtttcttaaccatcctgcaaataacacgaggcaaccatttctctctttgctctcctctctgctctggccacttgcctcttcactcctaaccttctgtcttcccaagttactcatacctctggctcctccgcccaggtgagggactattcagatgcttaggcacatacagatgcaaataagaggcatattaccctgagactatggtaaacagtaacagcctattgttaattaacaatacaaatgactgcacctgtcttagggggttcccttcaacctaccaggggtgccccgtcatggaatcacgcattccatcatgcgtgttctgtcttaggaattccctgaaggcaatgaaaaccgtaaccatctttggctggaaccagcctctgtaaaacaaataagtttagtgggggatgggccacggtcccactccaagccttatgaatcagcaagaaacctccagaatagcatcttagctcttatggctgcaaaccttctcctgcggatgaagacatttaaaggttaaaaatggcctttttaaaatctctgtggcaatgcctctaatgcttcttattaaagtttgctccctaaaacatacttctatcctaaggcttgtaaactgcatgttacatattctgtaagaatgaattctgacttctagtttctaataacatctgtataacacatatagcaagattacaaacattaacaattccatcatgaannnnnnnnnnnnnnnnnnnnnnnnnnnnnnnnnnnnnnnnnnnnnnnnnnnnnnnnnnnnnnnnnnnnnnnnnnnnnnnnnnnnnnnnnnnnnnnnnnnnnnnnnnnnnnnnnnnnnnnnnnnnnnnnnnnnnnnnnnctgggactcaatgccccttcaaacttttctatcacttgctcagagtccaaagttccaacatcaggtttgcagtatcagtctttgaaagttaactaaaaagtcttttgtccgtgtcttgtttaaacattgtgagggagcttctgccaccctggttcatgccagtatccgactgtcctaaatgggtcctttctcccaatgggaaaactggcaaaacagttttgtgtgtctgcttgtggcaagaaagcaagctgtgtgttgtcgagttcttagcctgctccggaatgagcactcacggattcagagaggtgaatgtagtccgtctgtagggaagctggaaactgggtgtgtctcccttcttcctccggctgtaggtcggatgtcctcaaggttcaggaaatacaggtccagtgtttcactccagctggttcagacggtctcctgtgggcccaggtcccatttttctcagttccatgaatctcaccaatctttccggtagccagtgtacctcgttctcctcctgcaagcaaacacagacatgccctcgacccccaaataattacggggtctggtcccctctattcatctctccatttgacctgagcgaaatttgctcgagttccttcatgccagaatctgtctgcatcagattgctcactggcatccatatttaaaaagtttaagataaacagtgcattctttaatgtggagactgggggcacagctccctcctttttatcttagaagctgtgcttttagggcattatgggcccgctctattattccttgtccttggggattataaggaatacctgttttgtgatcaatttttcattaagcacaaaataagctggaaagctttgttaatatatccagacccattatctgtttttataacttttggcactcccatgtaagcaaaacatcttaaacagtgacttacaacatgccttgtggtttctcctgtttgtggagtggcatatttttaacttgccaaactctgtaatgtgagtcacatccattcaccataaatggttggggagcaggccttgaggattcacccttaaattagccatagccatattgtggacatattccatattgtttgatgatttgaccagcagtctctctggttaagccaaatttcttacttagacttttgctattatgataaagaaagttacaagcctgtcgagctttttctatttgaggcaaatcaaccaattttgttaatcagttaatttattccctttggctagtaatcagggaaaggcctatttaataggttcccaatgtgatccataaacatggtaatactcttaggtgaataacattttgaatttgctcaaataatattttaatctaatactggaccctatgtatggaattgtctctattatctcaagagccttaaagacatagtgaccgtcaatatataaatttaaattaattatttaccagaatctgaaaggccattgcaacagcttgtagtttgatcatttgagctgaagccagagctgtctgctctatctattcctttctattaataatactctcccaatagaaccattggtaaaaatttaacatagcatatttttacaggactgctttttataattttggaaatataaaaggatgcattagtgtaaattttaacagtccatgagctagaaattgattatcaattcttcctgaaaactgagcaaagacaatcgcctaacatattacattttactactttatcacctgactgaccatttcagtctcacacgcttagtgtcggagacatgtatcatacttggttttctcctaaaatattttctaaaatctatatggcatttctgtaccatgtaggctaatgctttaaaacaagggtttaaaatatttaggctggtgaaccatagtaatggttccttctgccataaaccagaagtcggactatgctttgtggggagtacataagtttcccatggttttgcatagtcaatatatgtgaagatgctgaatcacctcttctaattatagaacttgtctatctttctagttagctgtctgggtacatttggatccttatctccttatagaatcttagttaaaggatttaaatcattagatgtcctgaaaaaggtacttaaccaatgaatattttataacaatttctaaaaaactcatttaaagattttaaactagtttttcaattgttatctattaagccttaatttctttagaatacaacatatgtttttaacaattttttagatttatttaagtttctgagtagccttttctaatctaaccttcgaagctgacaagctaagacctcatttgcatcttagctgacctgatttaatctgcatctgcaaagacataatcaagctgtgaacctaacaggttggctctctcctgaggcttttcataaaccctttttaaaatcatgtaccaatttttattttctagatttccgtttttaaccataaaaatttagtaagacctgtgtcctctcatctgccaaattttacagaatcatccatagattcctcgtgtctctaagctataggcttttgttaaccttttaattgactatctcctagggctgaaatcatattttttcctgttaagacattgactgactgactggatgctctttttggcaatgttaaagtgattttgatattttttcaaacaatatccgaagcaatgtaaatatctctaatcatatctaaggcaatttaggcatttccattcatccgcattcataaattcacaatcacatcacgcctccaggtgtggccacaccgttcattcataacttgcatacgtctcacatttctccttttgcctaggttatgatcagtttgttgaaaagaaaaatccctagttgaaatttctcctaaaatccttgaaatatgagcattcaagatttgaacaattctaagcttaaatatgttgccctttcttctttataagtctcaaaaacagtttctgtctggctgtatcaatagcatttatatnnnnnnnnnnnnnnnnnnnnnnnnnnnnnnnnnnnnnnnnnnnnnnnnnnnnnnnnnnnnnnnnnnnnnnnnnnnnnnnnnnnnnnnnnnnnnnnnnnnnnnnnnnnnnnnnnnnnnnnnnnnnnnnnnnnnnnnnnnnnnnnnnnnnnnnnnnnnnnnnnnnnnnnnnnnnnnnnnnnnnnnnnnnnnnnnnnnnnnnnnnnnnnnnnnnnnnnnnnnnnnnnnnnnnnnnnnnnnnnnnnnnnnnnnnnnnnnnnnnnnnnnnnnnnnnnnnnnnnnnnnnnnnnnnnnnnnnnnnnnnnnnnnnnnnnnnnnnnnnnnnnnnnnnnnnnnnnnnnnnnnnnnnnnnnnnnnnnnnnnnnnnnnnnnnnnnnnnnnnnnnnnnnnnnnnnnnnnnnnnnnnnnnnnnnnnnnnnnnnnnnnnnnnnnnnnnnnnnnnnnnnnnnnnnnnnnnnnnnnnnnnnnnntccaagtaaataaatatacaatcatctgactaacaactacctgcctgatttctctaactatgtatatttttacttttaaggccagcttacttctctttaccatctagctaatatttctatttcatatttacaattacctgcatttttcattccggagtttaacatattacattttactactttatcacctgactgaccatttcagtctcacacctactgtgtgcattttctctcattttaagggttagataacccgctttacctattctcatcagctgctggctgacattctctcatttgcccatcttcatcactttaagggttaaataacccgctttattttttttttttttttgtcagctgctggctgacattttcattttatatatattttgtgcacatttctgctttaagggttaaataacccgctttatttttttttttgtcagctgctggctgacgtcttcttattttatattgcatatatctgtttcctatttctaccattatatacagttttattcctgacttaacgctgttcattcaccacattcggccacttctttcttctttttcctgcgagtgcttcttccccaaccggttcgcccgcgacgactatgtctccgaagtgtccaagactctgccttgcccgtttcttcgtggtgtccatggcttcttccccgttctcaggcccacgttgggcaccattttgtcgtggcccagcatgtctcagccttagtccatgaagttctatctgagtggggggtgtggacctggaagctccaagcaacccaacggcgataaagaccaaacacaggcatcatcttgtcatctctagagagctctcaattccatgttgtggaactagagtcatttctttattagccatcttttctggtgtttcttaaccatcctgcaaataacacgaggcaaccatttctctctttgctctcctctctgctctggccccttgcctctcctctcctaaccttctgtcttcccaagttactcatacctctcgctcctcctcccaggtgagggcctattcagatgcttaggcacatacagatgcaaataagaggcatattaccctgaggctatggtaaacagtaacagcctattgttagttaacaatacaatggtgacccggagcttcctggcgccaatggcagccaaagcctgggacccaaaatattccataacagagatattcagtcccccacacttccctactctgaggatttctttttcgtgccctggagcggatctgggagctggccttccatgtcctcatcatttcctgttgtttctgtgtcaagtggaaatagtttgcagcaatgtaatgcaacagtgttctgcagtgacagcgaccattgcacagatgtttgagtgctgagtgtgggacatgctttcattattgcaggcagaccatactgtgagccaaccatacctcttttggtaatgcctgtcttttataaaagggaaggggggctaaagagatggcatgaatagggcacactttgtccaactctggtggctattaatcaatagctacctagtttccttaatgcccacaccaggccattagaaggactgtggtgccaggtggctagagagatagctcagtggttgcctgctgctcttccaggggacctgagtgcaactccagcacctacatcaggggttcacaactacctgtaatcccagctccaggggacctgataccctcttctgggctttgtgaacacctgcactcatatgaacacacacacacacacacacacacacacacacacacactgggccgctgaaaaatctgcgaggctggcctcaaactaacagagatatatctgtctttgcctccccagtctgggactaaaggtgtacaccaccaccagccaggatatttttttttttaagatttatttattgtgtatacaacatcctgcccccatgtctgcctgcaccccggaagagggcaccagatctcattaaggatggttgtgagccaccatgtggttgctgggaattgaactcagaacctctgacccaggatatttttacatggccttggacttctggatataaaacaggtatacaaatcaaacactaataatttactttaaaactaattgcttggggctggagagatggctcagaggttaacagcactgattgctcttccagagatcctgagttcaattcccagcacccacatggtggctcacaaccatctgtaacgagatctggtgcgctcttctggcctgcagacatagatgcaggcagaacactgtgtacatactaaataaacaaatcttaaaaaaaaaactaattgcttggtatacttatataatttttaccacttattaaagattaaaacaaatttgtacatggaaatgcttattttaaagaatttaaacttagcagggtgtggtggtacattcctgcagtcctagtaattggaaagacacaaggatcaggagttgaaagccatccttacctatatagcaagttcaaggctacctctctcaaaacacgcagagggtagggcagggtggggtattaagtctctgccaatgtatttggccctgaagagcatcttcagtgtttttcgtagttattgatagcttgattttatatagtcatccatactgaaaatgccactgcatataaatgcatgatacggaatttcaaaactatgtcttaaccccaaaccaaagttcatttcacaagttgttgtgcttattttttgaaacagggtctcatgcagcccaggttggccttgaacttgctctgtagcaatccctattttctgcagtgctgccaatgataatcagggttccctgtgttctgggcaagcgctctactaactcatttaattctaaactggagcagttttttgtttttttcatgagattcaagttagcagctcaaacaccagtcttttgtggtagtttggttttgtttttgtttttcaagacagtgtttttctctgtttccccggctgtcctggaactcactttgtagaccaggctggcctccaacacacagagatccaccagcctctgccttccaagtgctgggatcaaaggtgtgcgcccccccccccccaactggaacactaagttttaaagatttttctttctattttgtgtgagtgcatgtgcgtatgtttgtctgtatgccacctgtgtgtctggtgctgttggaggccagaaaagggtatcaggtccctggaattggagttacagacagttgtgagccagcatgaggtggcaggaactgaacccaggtcctctacaagagcagcccgtgctctcaacggctgagccatctctttggcctttcaaataccaacttttaaaaccaaacattctaatataatgcaatacacttgaacttgaggaaaacattgtctttattttctgtgattaaaccacatctctataagtgcataaaacatcatgtacaatctcaaacactgcaattcctgacatacggtagcctcaaatcactatgctcagttaacttccttatacagcctgggatttccatcctaggtaaaggtgctttccacaatgggcagagccatcctacaccaactaactagaaaacccccctcacccgacaaaagaaagaaaatccccaccccaccgacattgccacaggtcaacctgatgtaggtaactcctcagttgagattctcttccccagtgattctgggtggtgtccagttggcatttaacgttaaccaggactcgatgagagggggtgggtattataacctcctccacagcacgccagctcacaccacacattccaatatcctgcagacccaccacacgggtttcccacagatacatacaaatttccccatgatcttttcttttcttcgctttttgagacagggtttttctgcgtagccatggctgtcctggaactcactctgtagaccaggctggccttgaactctgagctctgcctgcctctacctcctgagtgctgagattagaggtgtgtgcatcccctctgcttgacttcccatcatcttcttcttcttctttttttggttttccgagacagggtttctctgtgtagctttggagcctaccctggcactcgctctggagaccaggctggcctcgaactcacagagatccacctgcctctgcctccagagtgctgggattaaaggcgtgtgccaccaacgcccggccccatcatcttaatagatcagaaggggatactttggggttaccaaactcccttgtagccattgttaagtcccctgtctgcctgcatggtggattatagatatttctcttctctcaattaggagttaaacttctggggctggagagatggctcagaggttaagagcactggctgctgttccagaggtcctgagttcaattcccagcaacacatggtggctcacaaccatctataataagatctggtgccctcttctggcctgcagggatatatgcagacagaacactgtatacataataaataaatctttaaaaaacaaaaaaagagtttaaacttctaaatcgtcttctcctcttcttttcccaaggaggtccacgtttttggatcccaggataaactctttagctatgaatgaacctgaacaattccatctcttcacactaccagctgtcagctgtagaatatgcaagccagcatctttattctatcttcctttttttttttaaatttttctgatgataaagcagatagtgctgttcctaacacccttctaactggagttcttcctttaggcaattttacccataacagcatatctggctaccgtggtaggggacatgtcatcactaacttcactgcagttaaacacactacattcagggactatgagttctccggtcgagtagaaattttgagtgttgtgctggctttgtcaactagaattacatgaggagaatctcagtgaggggctgtctacattgagttggactgtagacatgtcagtgggagattgcccaaattaacagacctgggaagacctaacctactgtgggtggcactattccctagggcggggctgggggtgggctccctaaactctgagtggagaaatagagctgaacaagcaagcatatctgtacgcattcactaaaacctgaaattataaactgaataaacaccaggtggtggtggtccacacctttaatcccagcactcaggaggcagggccaatggatctctctgagtttcaggccagactggtctgcagagcaagttccaagacaggctccaaaagatacacagagaaaccctgtctcaaaaaacaataacaacaacaaaaaaccaaataaacaaacaaataataaattgaatatactcctttctcccacaggccacttcctgtcagggtattttataaagaaagaaactaagctgtggcgggggtgttcttaccacacacagcttacacaccacattcatcatcagataccaaacgccatatgagtttcctggggagggggaaaagttgtctacctccaaatttggcaataacagccactggaagaatgactcagaagtccagacatgaataattgatttaactgaagattaaatcaattattggacatgacccaagccctaccatccctggttaatagttttctttcatacccacttatggaatctgaagtatctgtttatgggagcaagcagggaggggtggtggctaatgaattctaggaagatgagttttctataaagttttctccctggttccccagagaaaaatttgaacagactcggtgtcagttatcctctcaattttaagttctgccattccctagtcgcttgctggggtctctgctcagtcaaccatgcagctcctaacccaagatggtgatggtcaggctaagcttagaggaccagcttctcctaaatccacctcttaaaaacaaacaaacaaaaaaaaaaaaaaaaaaaaaaaaaaaaacttcttgccgggtgttggtggtgcacgcctttaatcccagcactcgggaggcagaggcagacggatctctgtcagttcgaggccagcctcatctccagagcaagcgccaggataggctccaaagctacacagagaaaccctgtcttgaaaaaacaaataaataaagtttatgtgtctgggtattttgtctgcatgtatgtctgtgaaccacttgcatgcctggtgccctcagagaccagaagaagtcattagatcccctggaactggagttacagatggtcgtgagccgccatgaaggtgctggaattcgaactcagatcctgtggaagagcagccagtgttctcaaccactgaatcgtctctcacacctcttaatattaccgcacggcaatcattttatttcttccatccccttctagtgtgaccagagacagccttggctttgggtactcacttgtgaaactactacgtaaaggtttgttgagtcccatgagattccccctaagcaacaccaaacggcaaggaggggagggcagtggagatttctctggaaactgagatgaattccagtcgaggaaaacaaatgtaagtctccctgtcgccttcgtcacctcaccgagtaagcattgtgccttcctcctcctccttgtccagtctccagccgacctgtgtgcaaacatgtgacaaaaacacaggtcaggccgtgcctgtcccttcctccctccaaacaccaacaccaagaacactcatgcttaacacacgtaaggcttagagggaagaagacggaaggagaaaacacttgggtttagggattcgttagtctggaaggattgaagacaaattccacaaggggaaaaaaaaaatgaaagaatgctttaccctctcaaactcacactttatatctagcagaagctgggtcatgtccccctgccctccctagagctggttcagtggagtaacatctcagccctgcctctgggaacaggcagctcagccctgtcaccacagcttgccaccctccttgcctctttagactggggaaggacagtgacaggagaaggttttcaaatagggtcctgctgtgtaagagcaggagaactgggctgttccctgggggagtatgtgcaccctgcctccagtgtctcttattttcactttcctttgctgagttaagtttctttttccccacaggctgtctggaaatgttctttcaaatcaaatctctccaggaagctctagatacacacaccagttcaagctgcttccagaaatgactcatgctggcatctggttcagtaggggacatgtcatcactaacttcactgcagttaaacacactacattcagggactatgagttctccggtcacaaagtcactaagagggtgggagaggggtaggaaaggaggaagagatggaattggggtagttgtgagctgcctagcatgggtcccctggaagagctgtgctttctctaagtttagagctatctctccagcctgccctttacccaaacccaactttcatatcataaccaaagtgaaggaaaatgtcggcttcataacaaagtagacaatacagaaatacagttgtgtgactgtccccaggcttgtccccgaacagaaatagacacatgcctaacttacattacatctgctaactttatttatgcctttgaaatttggggacatcattcatgcttgcttgttgtttgtttttttaatgggctttcctgtttttttaatgagctttcgttttgtttttgtgtttttgagacagggtttccttatagttttggctggcctctaactcctgaccctggcctccaccgccttcccagaactggttacatgctgggctttacctctgacagcagtctgccaaattcaaagacaacctgacccggcttgatttttgtactctttaagtcacctcgttatttcaaacggtgtatcacgtgattttaaacgtctgctccccacttcacttcctttatttttcttaagtttttagaattagggtacaaccatatactctcatttaaaaacataccacacgctacttccaagttcagggccgtcacccgttcttttccccctcccactcgtctccttcttttcccccaaatggtccaatttctacttcacatacaagggctttaactgttttctgacttgtttgccttgtgtatgggggtggggcggggctgggtggggcccggcaaggctgggcagggcagggcagggctggagtgcagctcctgtgggcagctgtcacaggacaacctgcaggagttgggagtcaaacgcagacagtctggcttggtggcagttgctttacccaccaagtcacctcaagggtttttccccccctccgcttgggggaaggaacatttcttttattttatttcttgagccatggtcttactatgcatatccagttggcctggaacttgctacgtagaccaggctggctttgaactcagagatccattttcctccaccagctgagttcggggattaaaggcgtgcgccaccacactcggctttttttgattttttttttttttaggctttattttgggtagatgcatgcatgacgtagaatgtgtgtggaggtcagaggacgatgtcagggagttggttctctccttcaaaatgtagctctggagatcaaactgagatcagcttggtggcaagagttctttcccaccgaaccatcacagggcccctcctgtacaagtttcagccacccaccttcacaccccacgctcagccccttaacaggactgggaaacaccaccaaccataggttcaaagggtttaatgccacaggcacccccttagttcctgttcacatcgctcaatattctgttggaataccagttagacccagcagtggccaacagcaagattccaagttccagggatgaaaaatccagatcctcggagcatgtgggctgcaggacacagtgtccagaattggtgtctacccacagcctgggagcttgtgaacgtaccagtgaaagaagcttaaaacccacccaggggcccgtgagatggttcctcgggtgaaaagtgcttgatttgaagcctgaggatgacctgagtttacctccccctgccaaactgaaggctgctgcaggccactgaatcccctgcatccaaaacagactcaaggataaaacagctcccgttctcttctctctgccaagaaaggcgggacccaaagcccaaagccctccccaaactcctctttgaggacctagaattccaccaagatggaaggagagacccaactccacaaaggtgtcccctgagcttcacacacatgcaacacaacccatcaccaacacaacagtaacaagatcaaaacaaaagaaattcaaaaatctagcctgatggcggacacccttctctatatatgtttctcttattggttggtgaataaaacactgtttggtcatagaggcaggaagacagatgggactaggagacgagaattctgggaaaggtaggcagaggtagccctccagagagacgacatgtagccaccataggagtaacaggtccagcattctccggtaagccaagaccacgtgaaaatagattagtagctatgggttaataactagaacagagctagccaataagaagccctagcagctgggtgttggagcacgcctttaatcctagcactcagaaggctcatcaattcagccacacagggtagccagtgagcgccagagagccgtgtatgtctatctgttcatctctcttgtggggctggggacctgaactcaggtctccacacttgtggagacagagccgtgtcttaggaccctctctttcctttgataaatacccacactagtggataaccgggtcatacggtagctatatttttagtttggggaatgtccatgctgcttcccataatggctatggtaatttacattctttttcccctacaccctaccagcggtttttcttccgttattgctggtgtgtcactgtggttttgggtgtatttctctgatagtaaatcttgacaattcttcacaggcttgttatgttttacagaacgtctgttcgggtccttcgaccactttttctttattgtgtaatttaattttattatggtttttaaacatgtgttggcacatgtgtctctgtgtgttatctgtgtccagatgagtgtatcagggactagagttacaggtggttataaactgctggagtgagttctggaaaccaaactccagtcctctgcaaggacagtatacactcctaacagctgcaccgtctccaaccccaccactccttttactgaaacagggtctcatctgtatactaccctgccctggaactcacgacgtagccctgacttgcctagaactcatgggaaacctcaggtctcagtgtctgggcttcggatttaacagtgccactttcatgcatattcatcatcacatttggctctgttttgtcctgttcttccacccgcaccctccctagtttgtgtgtggtacagcaagagggctctgagtgctcttgaaggccaaaggaggatactaggttcctgttctattatgtttgtcacattcctccgaaaaaaggtctctcactgaatctggagctgggctggcagctagcaagccccggtgattcacctctcttcacctcccacggcactgaagtcacaggcacgggtgcgtccagccatgaggcgcttgagatttgaactcagagcctcatgtttgcacagggcacacattggaccagagctcactctctctctctctctctctctctctctctctctctcacacacacacacacacacacacacacacacaaacagacacacaaataaaaaataaaataaatcttttttctaaaagaaaaataaaatctttttaaaacaaaataacaatgagcgtaatggtgcatgcctttaaccccagcacttgggaggcagatcactgtgagtttgaggccagcctggtctacaaagtgagttctaggaaagctggggctacaaagagaaatcctgtctcagaaacaaacaaaacaaaaaacggggaaacacctggtgagaaggaggaagaaagcaactgttagttaggatggtgggtgcctacggcacctgggccttgcagctgatgaggccaccatcctaacaccaagaaagaagtgagaggtcctcactagggccatgcacccccaggtgaagcaggctctgttccctctgttgtgcaatgtcagaaacaacaggcacagcctcctcatttgctgacattaaatttaaaaatccacaaaaatttagtttcttagccactttcatttgacactgtgagtttcactcttagccctggagaccaggaagtcctcaaatgacttgctttacataaccatcttgcacaaggtttcatgtctttgccttcctcttgccttacatgctggtttcctctctaatagtgttctgacttagttcatgggtcctgtgtgtgtggtctgtgtggtgtgtgtgtgtgtgtgtgtgtgtgtgtgtgtgtgtgttgtggtgtgtgtgtgtgatttgtgtgtggtgtgtgtgtctgtgtgtgtggtgtgtgtgtctgtgtgtctctctgtgtatgatgtgtgtctgtgtgtgtgtgtctgtgtgtgtgtgtctgtgtgtggtgtgtgtgtgatgaggtcctgaaaaactgcctttgcctcccacaccagctcacccactttattctagaagctcagttatatggaggcccccatggtccaatcatccttaaacttccccccactgctctgaaaacccagggctaggttgagtaacagcaatgaaactgagctgtcttcttccgtattcagtaaggtgtggaccacgagtatttcatatatggtcccaactgtgttatacacatttcctctataggaaaaaaaaaaaattgagccagggtctcactgtgtagccccagctgaattctgccttcaaagtactggaattaaaggcgcatgccaccatgtcgagtttcatatgtaatggtcttaaagatttgtttttgttttttttaatgtttaattatttatgtgttatgtatacgtgtggtttttgtttttgtttttcgagacaggatttctctgtgtagctttggagcctatcctggcactcgctctggagaccaggtggccctcgaactcacagagatctgcctgcctctgccaccctagtgctgggattaaaggtgtgtgccaccaatgcctggcttgtttttgtttttttaatgtttatttatgtatatgtgtgtgtctatgtgtgtatgtaaccctcagaggtggggatcagatgtccccagaatggagttccgagagtcgcctgccatgggtgtcaggaaccaaattcagtcaggtcttgccaagaacagttaagtgctcttaaccactgagccgcctctccaggcccagacttacctttttattttatgtgtatgtttgactatacatgtactccatgtgtgtgcagtaaccatggaggccagaagggggcgtcagatcccctggagttacaaagggttgtgagccatcactcagatgccaggacttgaacctgggtcctctataagaaccggaagtgagccaggagatgcacttgggaggcagaaacaggtgtctctctctctctctaagtcgaggccagcctggtcaatatagagtgagttccgggacacccagggctacatagagaaaccctatcttggaaagaaaaaaaaaaaggaagagaggaagaaagggagagagagacagagagatgtcagagcctgctcctgggtaggggcatgaggattgagaaagggcagataaagaaaagagacagaaacccaggacagattcgggaggactgcccggcccatgcctttcagctcaccggacagcccgagtctaatttagaccctgcttatacgcagactggaggcaaaagcagaaccaagaacagagaagggccgcgggctccctgtccctgagacccgctgggaggaaggagctccctgtgtccctgtctctgggtgactttctgctggcctcctccccagacaatgtgtccctcccctggggccaacacaacttccctggctctcagggaggcagaaacaggcaagctggagctctaataactcagaatagactccagatggaaactgagtcacctgtggacccacgaagacatcaacagttaagcatccaagaaatggaatgaagtggtctggcctgtcaggtctggggagagggaggggtgcaggaccccagggaagggaggggaacagggctctggggctgtggctgcaggaggcgggaccacagagttcaaggaaacaagctggagctgcagggtcagggacacaacactgacgcagagaagagcccagagcctgagagcccagggacacggacagcggactggacaggacagcaccgacatcaccgcagcagaggcttcagtgcgttgttagttcctgcccatacgcagctgtaaatctctaggtctactttctcgggggagcagacttgacagagcgcctgacaccatgtgggctctcatcttctggctcctgagtcgcccccgggacatcggagcccgtgagtgcggtgtggagggggttttgtgtcaactcgctgggcaagttcagggtggatctctgtgaattcgaggccaggctgattgacagagtcccaggacagccaaggctactgggtcgaaaaaccagagagagacagacagagggatggagggacggagagggagggagcgagggagggagagagggagggaagactaggggacagggagagacagaaaaacagggaaaggaaggagaggggaggggagaggagaggggagggaagggaagagaagggagggaaggggagggagtgaataaaaggaaacacagctagctaatgacacaagctgaccataaccatgtgaccctgctcccagaacaatattaaaaaaaaaaaaaaaaagacaaagacatggactcatagctctggctgtcttgaactcaacctgtacaccaagctgaccttgaagacataggatttgggcttaaaggcacccaccaccaagccataccaggcctttcctacacattctaatgtgtttgagtatgtgcttgcatataagtatgtatgctgtacccagaggggggctcagagccaacctcagccctctcggggagcagtaagtggtctcaactgctgacctgtggtgtggtttttgaactgcatgttgacctataaagtatacactgtccacattagagttcacatttattcatgtgcgtgtgcgtgtgcgtgtgcgtgtgcgtgtgcgtgtgcgtgtgcgtgtgcgtgtgcgtgtgcgtgtgcgtgtgcgtgtgcgtgtgcgtgtgcgtgtgcgtgtgcgtgtgcgtgtgcgtgtgcgtgtgcgtgtgcgtgtgcgtgtgcgtgtgcgtgtgcgtgtgcgtgtgcgtgtgcgtgtgcgtgtgcgtgtgcgtgtgcgtgtgcgtgtgcgtgtgcgtgtgcgtgtgcgtgtgcgtgtgctcagacagacagacagacagacagaaagaaaacaggcaagagagcaggagaagattgacagagaggactgtaacaacagataagcatctattttggggggagggagtttgaggcagggtttctctgtggctatagaagttgtcctggaactggctctgtagaccagaatggtctggaactcacagagatactccttctgatgggctgggactaaaggcctgtgccaccaccgatcttctggccagataagcccttttaaggactgcaagtgtcagacagggaagtatatagtggctgactgtagtgtcctgcctcaacttggtatgccagattttgttgactccccaaagaaagcattacccccactgagtacaagggagggcaggagaaggggagagaggagaaactaggattagtatgtaaaaattaaaattgaaagaaagaaagggaggctgaaaggtgggttgtaaagatcacaagaaagggtgcctttcagaaacaaggagaggaggggagagagatcaaagagctatcttaatagagggagccattgtggggttagagagaaacctggtgctagagaaattctcaggaatccacaaggatgaccccagctaagactgctagcaagagtggacagggtgtctgaatgggcctgccctttaaagattgctggtgactatctttgtcaccgagaacctacatccagtgcctgatggaaacagatgcagtgacccagagccaagcctgggctgagctccaggagttcagttgaagagagtgaggatcaagggggaggagtcaagatcatgatgggaaatagacagggctcacgtgagctactgggagtccatggactctggactgacagctggggagcctgcatgggacccaactagtcactctgaatgtgggtgacagtcatgtgacttgatctcttgtggtgggaggtcctggctgtggcaccagaacctttcccaggggcatgaaccggcttttgggagcccattcccaactgtgggatgccttacacagccttgatacagggggtgggtcttggtcctgcctcaacttggtatgccagactttgttgactccccaaagaaagcattaccccatctgagtacaagggagggcaggagaaggggagagaggagaaactagggttagtatgtaaaaattaaaattgaaagaaagaaagggaggctgaaaatgtagctcagttgaggggtgcctgtccagttcctgggtccatccttcccacaacaagaaacagaaacttaggctgggcattggtggcactcacctttaatcacagcactcaggaggcggagacaagctccaaaccctgtcttgaaaaaacaaaaaaaaaaaaaaaagaaaaagaaaagaaacagaaactttataaagaggaaaaagggcttctggctgtggctcccagggacagcctttctctccaggtgtagcacccctgcctgctcatctgggagtctccaggaggcttcagaggcttgggttgtagaaggttagagctgggaaccctggcttcctattatttttcttctatactgaaatgagctgaacccagagaggagtgtcgtagtgtctgtctcacagctgtgacttctaaggtcactgaggagagactgctttgagctctaggctactcagggccagaaaaacaggatatgggtggcctactctccacccttccaaagaaggagcaaacacagtgttccggaaagcctgccttgatacatcgcatcaacagatgactggataaagaaagcacagttcaaatacacagaattggattcactcagccatgcaatggaattgcatgccatcttcacgaaaaattaaatcatggcattgtgaggaaatggatgcagctgaaatcaatacactaagaagcaagcctcagaaagacaaataccatatatcttcttgtgtctggaactccagtttaaaaaaaaatgtgtgtgtgtgtgtgtgtgtgtgtgtgtgtgtgtgtgtgtgtgtgtgctggccatgatagtggacacccatctctgtgagttcaagaccagcctggtctacaagagctagttccaggacagcctccaaagccacagagaaaccctgtcttgaaaaacaaacaaacaaacaaacaaacaaaaaaagtaaaaccaaaaatctcctcacatcacacttttggatgctcatcccttttctttcacccccccaccgcccatcctgctggccacctttctcttctcaaatatacctttttaaatactattatgtgtttttttccatttgtttggaactggggtagccctggctggccgggaactggatctgcagggcaggatgacgtcacactcactcctctccaacagtgttctgacttagttcatggctggtgactttgtgtgtgtgtgtgtgtgtgtgtgtgtgtgtggtgtgtgtgtatgtgtgtctctaggaggggaggtcctgaggtactgcctttgcctcccacaccagctcacccactttattctagaagctcagttatatggaggcctccatggtccaatcacccttaaacttccccactgctctgaaaacccatggctaggttgagtaacagcaatgaaactgagatgtcttcttccctattcagtaaggtgtggaccacaagtatttcatatatggtcctaactgtgttatacacatttcctctataggtaattttttttttttgagccagggtctcaccttgtaggcccagctggcctggaactcagacacccacttctgccttcaaagtactggaattaaaggcacatgccaccatgcctttttttttttaaagatttatttatttatttattcattcattcatttattatacatgcagtattgtgcctgcatgtatgtctgcaggccaaaagagggcagcagatctcattatagatggttgtgagccattatgtgtttgctgggaattgaactcacaaagtttgaaatagaagtcagtgctcttaagctttgagccatgtctccagccccaggccaattttatatgtaatggttttaaagatttgtttttgttttttaatgtctaattatttatgtatacttgtgtgtctatgtgtgtaaccctcagaggtggggatcagatgtccccagaatggagttccgagagtcgcctgccatgggtgtcaggaaccaaattcagtcaggttttgccaagaacagttaagtgctcttaaccactgagccgcctctccaggcccagacttacctttttattttatgtgtatgtttgactatacatgtactccatgtgtgtgcagtaaccatggaggccagaagggggcgtcagaccccctggagttacaaagggttgtgagccatcatcactcagatgccaggacttgaacctgggtcctctataagaaccggaagtgagccaggagatgcacttgggaggcagaaacaggtgtctctctctctaagtcgaggccagcctggtctatatagagtgagttccgggacacccagggctacatagagaaaccctatgttggaaaaaaaaaaaaaaaggacgagaggaagaaagggagagagagacagagagatgtcagagcctgctcctgggtaggggcatgaggattgagaaagggcagataaagaaaagagacagaaacccaggacagattcgggaggactgcccggcccatgcctttcagctcaccggacagcccgagtctaatttagaccctgcttatacgcagactggaggcaaaagcagaaccaagaacagagaagtcggtaaagccgctcctgctctgtcctgcagggccgcgggctccctgtccctgagacccgctgggaggaaggagctccctgtgtccctgtctctgagtgactttctgctggcctcctccccagacaatgtgtccctcccctggggccaacacaactttccctggctctcagggaggcagaaacaggcaagctggagctccaataactcagaatagactccagatggaaactgagtcacctgtggcccccacgaagacatcacagttaagcatccaagaaatggaatgaagtggtctggcctgtcaggtctggggagagggaggggtgcaggaccccagggaagggaggggaacagggctctggggctgtggctgcaggaggcgggaccacggagttcaaggaaacaagctggagctgcagggtcagggacaacacagaggcagagaagagcccagagcctgagagcccagggacacggacagcggacagcacacaccgacaccgacacccacgacaccgacacccacaccaccaggaataggacgggacggggcgggggcggggctgacccacacctctccagggaagaaagccctcagcgccagccccaaaccccacccctgcagctgcttcatgttgttacttcccgcccatactaggtctactttctcgggggagcagacttgacagagcgcctgacaccatgtgggctctcatcttctggctcctgagtcgcccccgggacatcggagcccgtgagtgcggtgtggagggggctttgtgtcaactcgctgggcaagttcagggtggatctctgtgaattcaggccaggctgattgacagagtcccaggacagccaaggctactgggtcgaaaaaccagagagagacagacaaagcgaaggagggacagacagagggagggagcaagggagggagagagggagggaactaggagacagggagagacagaaaaacagggaagggaaggagagcggaggggagaggaggggggaggggagggagtgaataaaaggaaacacagctagctaatgacacaagctgaccataaccatgtgaccctgctcccagaacaatattaaaaaaaaaaaaaaaacaaaataaaaagacaaaggcatggactcagctctggctgtcttgaactcaccctgtagaccaagctgaccttgaagacataggatttgggcttaaagcacccaccaccaagccataccaggcctttcctacacattctaatgtgtttgagtatttgcttgcatataagtatgtaagctgtacccagaggggggctcagagccaacctcagccctctgggggaagcagtaagtggtctcaactgctgacctatcgtgtggtttttgaactgcatgttgacctataaagtatacattgtccacattagagttcacattcatgcgtgcgtgtgtgtgtgtgtgtgtgtgtgtgtgtgtgtgtgtgnnnnnnnnnnnnnnnnnnnnnnnnnnnnnnnnnnnnnnnnnnnnnnnnnnnnnnnnnnnnnnnnnnnnnnnnnnnnnnnnntgtcgggaggaggtggatccctgtggcgggccctgccagccacacacaacagatctagtgtaacaggtttagcataaggccatctggaaatgggaacatgagagaggcaggaaggcaggcaggcaggcaggcaggcagagagacagacagacagacagacagacagacagacagacagacagactgaaaacaggcaagattgagatagggtttctctgtggctttggaggctgtcctggaactcgctcttgtagacctggatggtctggaactcacagagatctgccttctgatgggctgggactaaaggcctgtgccaccaccgatcttctggctagaaaagcccttttaagggctgcaagtgtcagacagggaagtatgtagtggctgactgtaggtgggttgtaaagatcacaagaaagggtgcctttcagaaacaaggagaggaggggagagagatcaaagagctatcttaatagagggagccattgtggggttagagagaaacctggtgctagagaaattctcaggaatccacaaggatgaccccagctaagattcctagcaagagtggacagggtgtctgaatgggcctgccctttaaagattgctggtgagcctatttgtcaccaagaacctacatccagtgcttgatgcagtgaccaagtggccaagcctgggctgagctccaggagttcagttgaagagagccaggagcaattatattagcaagggggaggagtcaagatcatgatggggaaacagacaaggctgaggtgagctactggaagtccatggacactggacagacagctggggagcctgcatgggacccaactagacactctgaatgtgggtgacagtcatgtgacttgatctcttgtggtggggggtcctggctgtggcaccagaactttcccaggggcatgaactggcttattggagcccattcccaactgtaggatgccttacacagccttgatacagggggtgggtcttgttcctgcctcaacttggtatgccagactttgttgactccccaaataaagccttaccccctctgagtacaagggcgggggaggagaaggggagagaggagaaactagggttagtatgtaaaattttaaaaattgaaagaaagaaaaaaagaaagagaaatggaggctgaaactttagctcagttgaggtgtgcctgtccaggtcctgggtccatccctcctaccacaagaaacagaaactttataaagaggaaaaagggctctggctgtggctcccagggacagcctttctctccaggtgtagcacccctgcctgctcatctgggagtctccaggaggcttcagaggcttgggttgtagaaggttagagctgggaaccctggcttcctattatttttcttctatactgaaatgagctgaacccagagaggagtgtcgtagtgtctgtctcacagctgtgacttctaaggtcactgaggagagactgctttgagctctaggctactcagggccagaaaaacaggatatgggtggcctactctccacccttccaaagaaggagcaaacacagtgttccggaaagcctgccttgatacatcgcatcaacagatgactggataaagaaagcacagttcaaatacacagaattggattcactcagccatgcaatggaattgcatgccatcttcacgaaaaattaaatcatggcattgtgaggaaatggatgcagctgaaatcaatacactaagaagcaagcctcagaaagacaaataccatatatcttcttgtgtctggaactccagtttaaaaaaaaagtgtgtgtgtgtgtgtgtgtgtgtgtgtgtgtgtgtgtgtgtgtgtgtgtgtgctggccatgatagtggacacccataatccagccttcatatagatgaggggatggccaagtagggaccctgagagggaaggaagagatggccaaggaggcaggtgacacagagcacaaggatgaagcagcagaaactggcttgaccaggaaagacagccaggcagctggaagaggagcagtgagggagaagactgaatgatgacaaaacctaatggctcaggctgcagagagggctcactggtgaggagaacaccctacactgctcttgcagagggcgggggttttgtccccagcacccacgttgggcacctcacaaccactgtaactccacttccagggaacctaacacctgatttggcctccgtgtgtgtatcacgtatgtgatgtgcccacacaagccaaaagacatcggatccccaggaactatagttacaggtgcttgtgagcagccatgtgggtgctctgcaaaagccaacagatgccatctcttcagtccctaaaatgatcttcacaaaaagaaagtgcttgggatgaggtcagcagagagagcagctcctctcaggcagcagtcctgagttcagtccccagcagtcagaaagcaaagcagcctgcaccccagcatatggacacatatacacaaagacactagacacaagccatcactccatgctctaactcatttatctatctatctatctatctatctatctatctatctatctatctattggttttttaggacagggtttctctgtgtagctttgtagaccaggcttgcctcaaactcacaagagatcttcctgagactaaaggcatgcaccaccaacgcccagcaagttatttcttttttttgcggggggtggggggcgttcgagacagggtttctctgtggcttttgaggctgtcctggaactccctctatagaccaggctggttgaactcacaaagatccacctgcctctgcctcccgagtgctgggattaaaggtgtttgccaccaacgaccggctcccaagttatttcttattcatctaaaaccagtgtttcccatatgcctatcattttgtttcataagacagtcttactatataaccctggctggccttgaactcacagagctacaactgcctctgccttcttcagagtgctagaatcaaaggcctgtgccaccaataccctaccctaacttatttaaaacaaacaaaaattcgggagtgggggtgagatgctgcatctctgaatatgcacctcatgcagacagagcccttggaggccagaaggggtcaggagctggaggtagagatgaatgtcaggggccatgagcatgctgggaattgaactggggtgtctgtaacagtgaccatgctctcatccactgagccgtctctctggcctctcacacttacatttcattgtcagtccctgacttatcctagtgcagtgtgggatttgattggtttggctgctgggttgctgtgaagttgttcttatgctgagcaccctgtctcctccacagttcacctgcacaggcaggcacaggcaggcacactcactcccccgcccaggagctgggtcctcagtcagtaccttacactaaatcctcattcccacctcagggtcacattctctgctgtattcctactcggctgtgactaagccgggtccacaagtccctgcattttccgccactggcttcatagacgaccagcctttcattcgctataacagcgacagcatggaggcagagcctgctgttgactggctgagggaagacccagggtaccttgctgacgagacccagatcttcaccaataagatgaagattttccagttgagcctgagaaacatacagaagtactacaacagctccggggcccggagtcagagagtagcagatggcgtccaccagcaagcaggtatgtgcctggagaaggtggtaggacacagctgacctacctcactcatccccagaggcgggaggccctcagtgcccagacagactgaccgaccctggagaacaggctggcttaatctgctcccagagtcagggtctgcgagacagacatcagtcagtcagagtcccagatgtaaaacctcacaaacagctcacagtgtttgccttctgtgggtaagcagtcatgctgggaaccctgtgactccaagccagggggcctgggttgcagttgactttggaattcactagagaattcttcagcataaaagcttgttgttttcttgctggacagtggttattttggttcagtttgggttttttgtttctttgtttttcttttttttcttttttttttcttttttgagacagggactcccagtgcccagggtggcctctaatccactatgtagctgaggatggcctgcctgcacctacctgcttgcaggattgcaagtgtccacccccaccagtcacatagttcctcctttaccatcacccttaggtgccttgcaagctccgggtgttagctcaggagccctgtgggcttaagccctacatttccatgagcacaaggcaaagagagtcacagagaatgaatgaccagcatgaggacacagcagacctaagtcctacctgcctggccagtggttcatttactaaacctcaagcagcttgggcctggcccgacagagctgacagcacttaaagggtatcagtgctcagactacatgatgtataaggagaacaccctctaaggagagcacatggaatccgatgggcagtgcaagggcgccaggaatcccatgggcagtgcaagggcgccaggaactgttgtggaggtttttcttgtcctgccaagtccagctgccactcccagccccaaatgaacacacaaagacttaaactgttggccgatgcctagggcttcttattggctagctctgtcttaatcattagcccattgttataaacctacatattttcacatggtcttggcttaccggacaatgccaggacctgttacttctttggtggctacaagtcgtctccttgccacatctccccaccttccattcccagagttctcctggtctcctagctccacctagcatcctgcctctgctggccaaacagtgtttctttcatcaaccgatgagagaaacatgtatacagaaggacgtcccccatcaagggaccataatggagaggcctgggagatacatctggcggccctgacatgcttgtcctgggggcggttctaggccctcacaccctccagttcacatatggctgccagattcgagatgacagaagtaccacgggacactggcagtatggctatgacggcagtgactacctggccttggatttggactctatgcaatatgtagcagccacgttcattgctggctacaccaagcggaaatgggagcacagcgagtactggctggagagagacagcagctacctgaagacggaatgcatactgtggctccacagatacttggccctgggaggagagaacttcaatcgaactggtaaacacccctcctggcccagccctgctccctgtggccagcagggtgagagctcccatggccactccagcacagggatggatggaggtagtctctctgggcggggccactgtgccatgggtagcttcccacaagcagacgtgcacatttttgagtctcctggactgtggtcaccttccacccacctctctggggtctctactcgctaaatgtgtcccaaaggtccttgggactgtctcccacttctgccatttccactggagacatgaagctgtgcctaccagcagctatctatctgtttactgcagaccctccccagacgagagtaacccaccatcccagacctgaaggagacgccaccctgaggtgctgggccctgggattctaccctgctgagatctcactgacctggcagttagatacagaggaactgacccaggacatggagctggtggagacccggccttctggggacggaaccttccagaagtgggcagctgtggtggtgccttctggggaggaacagaaatacacatgccatgtgcaccatgaggggctgcctgagcccctcaccctgagatggggtaaggagagagtgggggcacagagctgggctcagggaaagcagaagcccttctggagaccctgagcagggccagggtccttcagggtccctcttctttcttttcctttcagagcctcttcagcacagtaccccaatcatagaggagtgtactaggagcagtggatgtggacatacagtatccaggaatggcctcgtgcttattgtcgttttcatagtagttgtgtttattattgttggagttgcctgctaccgtttgaaggtaggaaaaggaggtctgagcgccctatgttggaaggagggtcaagagttaagttgtgctgggcagcagcagctgtagtggccgtggcccacgcatgcctttaatcccagtactagggaggtagaggcaggcagatctctgtggccagcctggtctatcaagggagttccaggacaggctccaaaacaatacagagaaaccctgtctggaagaccccccccaaaaaaaaaaagttttggctaatctcatgctattttgacttcatgtcatttctgtaatatatttttaagattttatttatttattatgtatacagttatctgcatgcatgcttgcacccagaagagggcaccagatctcattacagatggttgtgagcctccatgtggttgctgggaattgaactaaggtccttggaagagcagtccatgctcttaacttctgagccctctcccagtccccatttctgtaatgtctttaaaaaaaaaaaaaagaaagaaaatgtaatgaaactctaaaacaactacatattagccccaattaaatgttttcctttataaaagttgttatgatcatggtgtctcctcacagcaataaaaccctaactgagacagacagcttcttttctaggagttgtgttcctgcagcatgccagcagactataggcataagaaagggtctcactatgtagctctagctgtcctggaacctcactaatattccaggctggcctccaactcatagagatctgcttgtctctgtctctgtgagttcaaagccagcctggtctatagagagagttccaggacagccagagctacagacagaaaaaccctgtctcgaaaaactaaagcaagcaagcacacacacacacacacacacacacacacacacacacacacagcaccctagggcaattttacacactagcaaggtagaaaatgtacaggttttaactactgagccaccttttcagtccctaaaattgaaattgctttaaagggcccgagtatcatggagtacgaaagtgactctaaccatatctcctgtccctcatcagtctgttctggagctctgaagtttaaattggcttgtctgcttcatcttaggtccttcgctagggcaagtgcaccctcttaactgcagagccatctccccgaccctgaaacttctattctctgctcattggcttttgtgttgacaggcatcaagaactctggcacctcgtcacatgtcccggcagctgtaaggaacaacctggctctcctctcttttctgctgagatgctgagccagcggccatcgtctagcaggcacaggggttgcagacctgagctccctctccagagggactgaaatgagatgatgaaatgagcgggctcccccctggcccagcacataattcctggtgttccctggacttcttgaccttgccatttcatccaattcaaaggagtccagccctgcagctccaggagaggcactggggtgtctgacctgagattatttgcatgattactctgaaagagtaatcatggcttgagagccttcacccagtagctgatggcagcagaagcagacacccacagctaaacactgagggaactcctgcaatccagttgtagagcaggaggagggatgagcaaaggaggcaagaccatgctggagagacctacagaaactgctgacctgacctagtgagagcacagggaccccagctgtaaagctggggaaccagcattggactgaactaagccctctgaatgtgggtgacagttaggaggcctgggcagtctatggggcctctaacagagccagtgtttatccctagggcacaaatggactttcccattccctatggagggatgctattgcagcccaatacacgaaagagtggtgggagagttgttaggccagatgttgggccccagccccgacggcgtctctgtgagttgatgcaaccacagcccagccatgccccactggctcttacaccttgggttttttcactgtgccataagtctgtacataaggctgctttctccctgccaaaaagatagggacacacatagcacaagcagcaggctctgcttataactaaatctctaggcttctgccagtaagcagcacctccttcggggcctctgcctctgctcctgcctccaggctcctgccctgtgtgagtgcctgccctcactacctttgaagacgaacagttatttgtaactatgggtgaaatatgttgtttcatcacagccatagtgcgatgggggacgtccttctgtatatatgtttctcttattggttggtgaacaaacactggttggccaatagccatgcaagaagtataggtggggctaccagatgaggagaattctggggagaggatgcagagaggggtcaagagacactgtagttaccaggaagattggatgcaccaggtgttcttcggtaagataaggccatgtagaaatacataaatagtaatgggttaataacagaaagcctgtaaggaaactgagtcattggccaaactatagttactgtgagtttctgtgtgtttatttgagtctatttggctcaggaccaggtggaaaaggaactcagtctgcaacagtgatcctacctaagacaaacatgctcagcctgcagagatatggggacatcttctgcctatcacacagcatcgggggactctgtggctatctttaactctcttcatcacagatgaggaatgactaacacgactaacgggccctttgtggtgagggcgtgcttatcacactggtgcacacggcgctgaaaagagctcacttgtcaggaaactatgctgagacctgtgaccctgagcaaagccgagcagtgtggaattccccatgctttcagtcacagagggcataggaaggactgacgtatggaccttgacagtgaggatgtaaggcaccctctttatgtggtatacggtaagcacacagggcaatcttttaattgtatttgcatttatttattgtgtctgtatacattagcagccagaggacaacttgtgggagttggttctctccttccaccgtgtggagactggggatcaaactccagtcatcagagttgacagcacgccctttacccactgagccatctctcaggccccgccctcttctgaccttggcaagcatcccttgaacacatatttacatacatacatgcatacacataaataaaaataagatcttaatcccagcactcaggagtcagaggcaagtggatctcagtgagttccaggccagcctggtctacagagtgagttccgggacagccagggctgtaacacagagaaaccctgtcttcaatccccacccccccccaaaaataataataatactttaaaatactgcaaatctatgtgctgtatgagcattaaaacccataacaaaataccagctaacataagctctttaaacaaaaggccagcacagtgaactgattctatgaaggtcatgctttgaatttaaagtgtccctcatgtttttagcttgctttcagcagagtctcacacagaccagctggcctcaagctcaccatgcagttgaaggtgactctaaactcttgaccctcctgtattcaacacccacgtgaggaggtgacatctccatatcgggctttccccatgccttaaaacattttccccagctgccttgctttggtccctagggaccttttaatttaatgttttaaaactccttgttctcatacaacaaggacatctgttcaactatgttcatagcagcactacttgtaatagccagaaactggaagcagcctagatgcccctcaaccaacgaatggatagagaaaatgtggtacgtttacacaatggagtactactcagcagaaaaaaacaatggaatcttgaaatttgcaggaaaatgcatggaactcgaaggaaccattctgagcgacgtaacccaatcacaaaaagacaaacatgatatgtactcactcatatgtggattttagacatacagtaagagactaccagcctacaatccacactgccagagaaactagtaaacaaggaagacnnnnnnnnnnnnnnnnnnnnnnnnnnnnnnnnnnnnnnnnnnnnnnnnnnnnnnnnnnnnnnnnnnnnnnnnnnnnnnnnnnnnnnnnnnnnnnnnnnnnnnnnnnnnnnnnnnnnnnnnnnnnnnnnnnnnnnnnnnnnnnnnnnnnnnnnnnnnnnnnnnnnnnnnnnnnnnnnnnnnnnnnnnnnnnnnnnnnnnnnnnnnnnnnnnnnnnnnnnnnnnnnnnnnnnnnnnnnnnnnnnnnnnnnnnnnnnnnnnnnnnnnnnnnnnnnnnnnnnnnnnnnnnnnnnnnnnnnnnnnngtagattagaagaaaggatatgccataggtagggctttagttgggttggtggtgggaggggaggaggggagggagaagggaactgggattgtcatgtaattcaatcttgtttgtaactcaaataaaataatataaaaaaataaccatcaaggcagtggtggggcacacttctaatcccagtacttggcaggcagatctctgtgaattgaaggccagcctggtttacagagtgagctccaggacagcaaggatacacagagaaaccctgtctcgaataaagcgaaacaaaaacaacaaaaaccacaaagtgacgtcactgaacatgacctgcaaagaggtaatacagacaaagaatcccagcagcacagagagcagctaagtgggtgaggtaactgagcaacaggttttgagtatttactgttgggtcattcttgatctagtaagctgagagtggggggggatgcagtcctaaaacagagctcccaggaggctgacgaagaaagaggatgtctccttggccaccctgggctacatgatgaatgagtgatatttctggcagaaatatccatttaaggcgggaagtgagacagaatgtgtgttaatgctgtgaagacaaatccaaagaaagaaccaaaagcaatcaagctaccagctgtaaaagactggctggttgctcctcgccagaattctggccgattcgtccttctctcttggcgggctcgactgaagagtgacagagcctgtcctgccttcctgaggagagggctggactctgaaggtcctgagcgtcctgctggttgaacctgatacctgaccctgcccacagatactcaacctcctgtcagaggctgccctcaagtggacactttggcaaattaaaattgtgtgaggtggggtgtgtgtgtgtgtgtgtgtgtgtgtgtgtgtgtgtgagagagagagagacctgtgtgtgtgtgtgtgtgtgagagagagacctgtgtgtgtgtgtgtgtgtgtgtgtgagagagagagatgtgtgtgtgnnnnnnnnnnnnnnnnnnnnnnnnnnnnnnnnnnnnnnnnnnnnnnnnnnnnnnnnnnnnnnnnnnnnnnnnnnnnnnnnnnnnnnnnnnnnnnnnnnnnnnnnnnnnnnnnnnnnnnnnnnnnnnnnnnnnnnnnnnnnnnnnnnnnnnnnnnnnnnnnnnnnnnnnnnnnnnnnnnnnnnnnnnnnnnnnnnnnnnnnnnnnnnnnnnnnnnnnnnnnnnnnnnnnnnnnnnnnnnnnnnnnnnnnnnnnnnnnnnnnnnnnnnnnnnnnnnnnnnnnnnnnnnnnnnnnnnnnnnnnnnnnnnnnnnnnnnnnnnnnnnnnnnnnnnnnnnnnnnnnnnnnnnnnnnnnnnnnnnnnnnnnnnnnnnnnnnnnnngtgtgtgtgtgtgtgagacctgtgtgtgtgtgtgtgtgtgtgtgtgtgtgtgtggtgtgtgtgtggtgtgtgtgtggtgtgtggtgtgtgtgtgtgtgagacctgtgtgtgtgatgtgtgtgtgtgtgtgtgtgtcagacagggtttctctgtgtagctttggagcctgtcctggatatgtgtgtgtgtgtgtgtgtgtgtgtgtgtctgtctgtctgtctgtctgtctgtctgtctgtctgtctgtctgtctgtctgtctgtctgtctgtctgtctgtctgtttgtcctggaactggctctgcagaccaggctggcctccaactcaaagctccgcccgcctccgagtgctgggatcaaaggcgcgcgccaccacccccagcttgcacttgtcactgacctctcgatctgatctttacaagccccctgaccaccctgaccacacggtagctgtgggtgaaggagtgcgtctcttcttccgtttgagggggacggatagatagttctgtcccgtcgggcaggtttcccttcagcagcctcagagtctgtctgtgtgtcacagccaaacagccaaatacccagtcaagcggcccagccagcgggtgtgcagggtgacatcacagccgacatctcagaggggcacagcactgacaaactcacggtgtcctcagtaccctcagttcccgtgcacgctccggactccagttactcaaactccagatgactcggtcaccctggcaccgcggcagactcgcagcaccggggactcactgtgactccacctccgggtgtcccaaagtcaaggacagcgtacagcggcgacagcgccggacaactgctcagaatgtcagccttcgccccaggcaggaccccggcgccccctagtggcgcaaagttagagcggctgcaaccctggaaccccggccaggctcagcgcgcagcagcttcggctgcaaagccaacaccctaagatcccaggccgcccagcgctctgagaacccggcggagggaaagtgtcacggggtggggggggaaccgggtttatcagctgccccacctgtccgggcatccaaccagaaaccactgcaggctgctgcaaccacaccccgcgcacgccagggcctgggttccatcaacacatgggagagggacaaaaataaaataaaataaaatgcatgtcatcccccggaggtgacagacgcggtgggagggggactggtccctctccaccagagaacaggaggtggggtgcggattgtgagcaaaccctgcctctctggtgcgctgtctcctccccgagctccgtcccgctctctgcaaaacctttccatccactttcagtgtcagcctagcagggtgttataaaccgttaccgggcccagggcggtgagattccggaacagagacggagggagcagccagcccaggctctcctcagcatccctagtgcgtccgcgcggccaccccgccccggctgccaggagaacccaggcctggctcttggctgcctctgtcttgagccataaagggcgagggaggggctccgtggttaggagcaccgactcctcttcaagaggacccggcttcaatccaggaccctacacggtggctcacacagccgtctataactccagctccaggagagccaacacccacggcaaaacaccaatgcgcatatttttaattaaataataattttaaaaaaccgtcaagggaggcgggtggcggcgggggcgcacgcctttaatcccagcactcgggaggcagaggcaggtggatctctgtgagttcgaggccagcctggttttgcagagcgagtgccaggacagactccaaagccacagagagaaacaaaaaacaacaacagcaacaaaagcaaaaccaaaaatctcctcacatcacactttgggatgccgatccctttccttccgccctcccgctcctgccggccacctttctcttctcaaattctttttaaaatactatggtttttttttttcccccgtttgtttgaaacggggtagccctgtggcccggaactggatctgcagggcaggatgacgtcacactcgggagatcggaagcccctggctcccacctcccagccccgggccccgacctcccaggccccgggctgccccgggcaccgcgttctgaaccccgggtcacgtgcttcagaccggcgcagtcctgacaatttggggataaatcagtaaagcggggtggggtgggggttaagatccaggccgggaaaagaaatcaaagtaagcactagagaaagagctccaagttggggaactttgaggattgcaatctctcctttccctttccctttccctttccctttcccttttctttctttttttttcttttcttttcttttttttttctttttttttttggtaaccgcgatttctatccagaagcccctttcccaggtttaggcgacagagcgagcccaggacggccaaggccacacgcgcacacacagaggagaaacaagcacaaaaataacaatcatgaaagtaaagggtttatcccggcttaccgtttaagaggaaacccgcggagctggcgaaggcgaaccggctttgcacagagggaagaagatatgaagcttaaaaaccctgacttcccagaccccgtgacctacttccgtcagcagacgccccctactgggggttccgggaaacggctgcgatgggctccactcgcaaaagaagctaactctttttaatcccagcactctctccggaggcagaggcaggaggatctctgtgagttcgagaccagcctgaactacagagcgggttccaggacagactccaaagccacagaggaaccctgtctgaaaaaccaaaaaaaagaggaggggaggggaggagaaaggaaaggaaagaatacacacgttttaatgatttctctttatagccctacaggggtagtgcactcctttaatcccagcacttgggaggcagagcctggcacatctctgagtcccaggccagcctggtctaagtgtatgtatgtaggcctgtctggggtgtgtacgtgtgaatgcgattgccagcagaggccataggtgtccaaacccctggagatgcatttaccaacatgggtgctaggaaccaaactccagttccctggaagaccaccacaaattcttaactgccgagccatccctccagcctccaatttttattttttgagacagggtctcactatatagccttggctgagcagaaactcgctctgtacaccaggctgtcctcgaactcacagagatcctcctgcctctgcctcccgagtgctaggattaaaggtgtgcaccaccaccgccggacaaacaagcaagcacactcttaactgctgagccatctctccagtcctattcttcaaaattaaaaattaaaaagctaagccgggtgttggtggcgcagacctttaatcctagcactcaggaggcagaggcaggtgggtctcggtgagttcgagaccagcctggtctccagagtgagtgccaggataggctccaaagccacagagaaaaaccctgtcttgaaaaaaaatttaaaaactataaataatttccatactattgtaatttttacactacaaccgaagaatcctgggctttagctcattagtgtcatttattttttgttttttcctaagaatcaaaaggttctcacacttcaagggggatctgaactggagttacagacagttgtgagccaccatgtgggtgcttggaatcaaacccagggtctctggaagagcacccattgctcttaaccactgagcccttttctatccccaagaaaaactttaaaatgttccaaactttgttatgtcatcattcaagttcagctttaatatttaattaaaagtcattgaaacctgctacaaacagaagaatgcagctaaatgtttaaaagcagtagcaggctgggtggtggcgcctttattcccagaagcactcttcgggaggcagaggcaggcggatctctgtgatttcgaggccagcctggtctacagggtgagttacagcacagccaggactgtttcatagagaaaacctgtttcaaaaaaataaaagtaaaataaaataaagcagcagcaacccaatggcgataaggtcttgttatttagcccagaatattctacaaatccacagcgatcctcttgtcttgcctggagtggtggtgagtttaaaggccacaccacagccctgctgggacaaatgcgattttactgtttcctctgggctgctatgacgcagcttttccagcaggtggcactgcaaagtcgcgggtgcggcgaaaagaccctttggtcaaggccgctgggatccggagttccaagttaccgcagaccttggtgtttttcctgccgttggggttactcgtcactacttgctggtacataaatatttcagtacagggctgagctgcacccgctcagccgtctgaatgtcaccgccagtcacatccaaatgtgggttctgggaaccctgggggagaagcaagtgctccaaatgctggccttctctccacccacacagccagaccctttgacggctgcatccttatcccaaggcatgcgcctcctcccgctagaccgttagtcttctgagctcacctctccaatggctccattgcaccacaatggtcaaaacctccccatacctgtgaagtcgttgccttcaacatctccctctggtcgcttctcctccctctcctacgcactccgggttttctctaactggctgactcctctccccagacacgaagtaaaaagtctgtaaattcccccactttcttcctagccaggttcgcggctcacactgtagacgacctattcctctcctcccacctctgtatctccagccggcacctcttctgcaagttccacttgtacttacgtctctggaaactgtccatgatacccaagcccccagttgccaagtccgatgcctgatgtacactcttgacttactctcctacccgaccgacccaggcagacacactgcaaaacaagccaacgacctgtcaatctacctcctgaatttactctcagctgccttcctcccactggttctggttcgggttcctcctaggatgtctacagaacccaccagtcatgctccccttccaaatcagtatctgtgttgcagccacagtggtctacagtcgattgattttctgccttttagtcatccggttaaatttttttgttgttgattcttgtgttgtttttttttgggggggagggggattcaagacagggtttctctgtattgctttggagcctgtcctggtactcactctgtagactaggctggcttcgaactcacagagatctgcctgcctctgcctcctgagtgctgggattaaaggcgtgcgtcaccactgcctggcaccagtgggcttgcaggacctactctgagtccagtctagacccagcttccagagccgtagagatggtgcacaagcccaaggaactgagtttggatctccaccacttctgtaaaaagctagttgtgggcgggggcggtagtggggcattccttttgtcccggcactcactcgggaggcagaggcgggccgatctccgtgagttctggagagggagtgccacgacagcctccaaagctacacagagaaaccgtgtttcaaaaaaccaaaaccaaacaacaaaaagccagtagtggcagggggcatgtcaaccctagtactttggagaatccctggagttcagcagtcagccattttagccaattaataagctccaaatccagagagaaccttaccctgccctccatgcctgcacaagccagcttccagattgtgtctcaacacttgtggatcaggaccccagtgggtcctatgccactcttctcccagcatttaccacattagaaaaaaaaaagttttttattgcattcatcactcaataaaccaggagctccaccagcagccatttttaccctttttgtcaacaagcagtgattgacgggcatgaattactcaacaaatattcagtgggtaggtccctggggtttacagtatgcttcatcctagctgtgacagttcagtgatacatgcaaataactagttagcagtggtgtctggttgctgtgttctgctgggttagacacttattcaaaataatttgtttgtcccaaaacctctggcaaatagttttcaacctttgctgattgcatcattggttctgagtctggctaactggactcatctggaccacacacagctacttacttcagaatgagagctatataaaaagttcttgcattaagagtcttgtttcgccgggtgttggtggcgcacgcctttaatcccagcacttgggaggcagaggcaggtggatctctgtgagttcgaggccagcctggcctacagagtgagttccaggataggctccaaatccacacagagaaaccctgtctatgtgggggggtcttgtttactctgctagactggctagctgcatgacagagccacagaccactacggtggccaggtacctacttagtgaacacaacccaagcaagagagaggaaagatttgagcatttgagcatgagaaggaaatgaaagtttctccctgacttcaggctagggcatgactttccttccccgtgacctgtctgtcactaaaacagatctttgcctcgtcttgttttcccataaaatgagcaatgacagtgaccgatctttttaatttttaaataatttatttgcattttatgtacattagtgttttgcccaattgaatgtctgtgtgaggttattcaatgccctggaactggggttacagacagttgtgagctgccatgtgggtgctgggaattgaaccagggtcctcaggaagagcagccagtgctcttaatctctgagccatctctccagcccagacagtgaccaatctttaaaacaatattggctcctgtgaggtcttcagctcaactccaccgcagcctgactcccaaacgcccaggtgtcaacaggagacagtgagcagaagcatcgagggaaaagagtaccaacagaatcctcactttttgctcttgtctgtgaaactcaagaaccctacacgggagactggacttttcttagttgaggtttcttcttttccagcacattctgtgtgatcttcatacatgtccacatgctgtggtcctaacaccacgtggcagtgcagcctccaggacttgggtccacaccggagccatcaaagggagtaaacttgaaggaacacatgggcggaggcctcagccttttctcggggaagttcctttctctttggtgggccaatcagggctgacactggagaaaacactgcccacccaggaagctagccgcggggtccacactcccactcgaaccatacaaactgtggctgccccctccctaacattgtcccaggcaccttccaatcctaggtgagaccttaaagattctgagctccatacccagagtaatagagctcagaagttggttctgcgctgacgagcattttgtttttatatgcattgatgttttgcctgcctgcatgtatgtctgtgtgagggtgccagattccctgtgactggagacacagacagtgagtgctgggaattaaactcgggtcctgcagaagagcagacagtgctcttaaccgctgagtcatttctccagtccagctctcagtccctcaatgagatgtgacccttaaagaacaaactgctctgctcaaactttgaatgtgcgcactcgtttgctggcaagaactctccacctgtacacacctcactaacattttcacaagtgtcttggtatatttatgtctcacttaattccagaattatactctaagtccccaggatttgcaggaccagacacacccatcttaatccaaatctgtgctccacgaggtctggtcatggccagtcctgactcttgcatcatacagagcattttgtgctatgcacaggtccagacacaaactcctgataaatatctgctgagtggaaaattcctattaacctctgtggctccttcacccaaaaacccgctataacccaggccaggcagcagggggcgcccaggacacagctcaaaggcaggtgagcctgcctagacctcctctgcccagggggactaagtgctgtgtgggagggaatgtcagcaccaggccctaggtaactctgcttcccagagagaatggtgaaggcaaaccgcctcccagcctcccacagctgtcagccgctctcactacagacgacagggaagggatacaaagcagaccatctttattcacaatcagggtggccatggggaagacctccagctcagtccaaaagcaaagctaccgaggacaatggagacaggaaggggggctcagcactcgccctcgcccagcagggcgtatgggttgcgggcagctaggcaggacccagggcctgaggttggggtgtcctcatcgccttctccttcttcatcagcatcccggtcttcctctccttcctcctcacaggagctgctcagctcttcctcctcttcctcctcctcctcatctcctgctggccccaccctaccctgcaacaccaccagctcagtcgtctccgcatgagtctcccaggtacctgaggaacacaaagacgtgtgtgagcaagagagaagaggcaattcttcagagggctagtgtgtaccccttcactctcccagccatttgcagagcttgacaaagcttgtgcatcttcaatccccagtcacccatatttgcagatcagtacgatatcatcaaagctggccccgtcgtgaccctctgtctggcctcacctgtcagcagggactgcagagaacaccgggctctcacctctctgttcactgtaaccaggtgggtggaagcacaggctgagacggccatccacagccagccgcagaaggctgttggctgctctgtacacatcattgcgagctgccttggctgttttataacctcgtttctctgcccacgctgaaaggagaaaatcatgtcagtaagggaggcccgtgaactaggttccagtcctgtcagtcccacacagtccaggcatgaggaaaagacacctggggtatgagacagcccccttcccccaggccagaatgttcattgggagggcagggtaggcaagagacaaatgcagagaccatgaagcctaccttcgcagatgtcccaggcacaccaggggtgctccgctgaagggtcctccgcctctgggtggcgcaggtgcagcagagcctgcacggggattcgggaggccaggtaccccacagcagtgtagggctcctggatctgagagatggggtagattccagccagaacctgtggaaacagcagtcactcagcaccttccccagctcagccttctccccagccccgtaacccaacacacctgcagctgcctgggcagcagagacgggaagataaggcccggacagtcgcagagcttcactgaaggggtgagaaagtaagtctggaagtaccgggtgtggcctggcgttctggagacactcaccaccttccgccccaccagcccgttgatcagcgaggacttccccacattggggaaacctaggaaggcaatgcaagggattatggaatagcccttactctgggccagagaggctgtcaggggaggaacagcttggggtaacacaaacacacataaaaactaaatctaagactaaaccaaaccccacaaatatctaagacattaaatagacaaggtctcttgtcacctcttataccccccaaaatgagaagagatcttagaccccaatcacacattccttttcctctacagcagtggttctcaaccttcctaacactgcaaccctgtaatacagttcatgttgtggtgacccccagccataaaattttcactgttacttcgtaactatcatttagcattataaatagtaatgtaagcatctgatatgcaggacatctggtatctgactgctgtgaaagtcgatcctcgcaggggtctcgacccactggttgaaaactgccactctactgtagaccaggctggccttgaactcagagatttgcctgcctgtctccaggtgctaggattaaaggcgatcccaccacacctgcgaccaccctgaacagggctctgacctagaggaagctgatacttctgccctcctgctatgacttagggatccctgtatgaggaaccaacactcacaacggaacaatgactctaccagtcactcagggcagtatataagaagcatcaggctcagcactgcgcctgccattcctcacctcccttcttgaactgtgcattggcaaactcattcattcactagaacttaagcacagtgcagtaggttcccttcagtccccccaggacggacagtggggttcttcccttgaagaacctgcagcccaaatattcctagcttcccccctccagaaacactgaaacacagtgcctaaggaagccatatggcaggcagggcccnnnnnnnnnnnnnnnnnnnnnnnnnnnnnnnnnnnnnnnnnnnnnnnnnnnnnnnnnnnnnnnnnnnnnnnnnnnnnnnnnnnnnnnnnnnnnnnnnnnnnnnnnnnnnnnnnnnnnnnnnnnnnnnnnnnnnnnnnnnnnnnnnnnnnnnnnnnnnnnnnnnnnnnnnnnnnnnnnnnnnnnnnnnnnnnnnnnnnnnnnnnnnnnnnnnnnnnnnnnnnnnnnnnnnnnnnnnnnnnnnnnnnnnnnccgatcttagctgcctccatgtctgcaaaccccatatggcaggcaggccactacgttcttacccacacagccgatggtcaccactccatccttgtagcgctccctggaggggcctgtgggctccatcgctgagtcagtctgctgctctaccaagaccactggcccatcttcttcttcctcctcctcgccagagccgttaccccaggaggccccggccatgtccctagcaatcttctcacgccagctgctcaagtccactgcccaaagaagaagatgatgacgataaataaagggggtttcccttacccccagggcactatggataacacacagttggtatcaccagcatccatagaaaccacagcgagcacatgtgtactagagcagactgaaaaactccccagtctgcactggaccccactcgggagttagacataaaagcagctaggactgggggcgtcaagccatggaggttcctagccacctcctgctcctgtccttcctaccattaggggttgctccttattcaacaaccttcctaaacacacgtaacggagggatattgagaagtgaacccttcagctgcccccaaagccttccatagccccctccaagggacatacatacctttccccgcagtgatggcttcgcaggctcttagcaactgctctggccccagcgcctgagtccatcctctcccccgccttcgattcttcttcaagactgaggtgagagggtgaagatgcatcaaatcaggttcctttgccaacaggcttctctgttcactcacactggcctgctcacctcatccccccctccaccgcctgctccccccaccccgccccgccccnnnnnnnnnnnnnnnnnnnnnnnnnnnnnnnnnnnnnnnnnnnnnnnnnnnnnnnnnnnnnnnnnnnnnnnnnnnnnnnnnnnnnnnnnnnnnnnnnnnnnnnnnnnnnnnnnnnnnnnnnnnnaggggagggaccggagacgcgaaagaggtgaacaggacaatgtggagctgagggtagtgctggtgaaagtaatgcttccaggccaccacaagggccggtggagccagatccaccttgttcaagaccagcaccagggctagcccaagctctccagttacatactcataaagtgctggagggaagttcacaacctacaacagaattggtaagaggacagagtgagaagtgatcccagaggtcgctggctccagctccccatcaccaggtacagtaaaaaacgccaggccctggctgaagtagatgtagtatgggggaagacggtcaaccagccacactgaaaccccagtgggtcctatgccactcttctcccagcatttaccacattagaaaaaaagggagggaggggggaggggagagggaaggaagggggggaagggaggaccagaaaatataacacctggctgggtcaggaacacgaatgggggctgggtgagtggcatctgtttctatgtgcacataactgtaagtgtacacacgtgtacagccacatgcaggaaagtatacgcacatgtgtacacatttgtgttgtgcacgtgatggtgcctgtggaagacctccaacctaaatgtccctgcagaccccccttctccactggaagacaacagtgaggtggcagtcgggaacccaggactcacagagctgtccagcagtggtctacatctcccccaccatcctagcattccaggtatgatctgtggcaatgatgctgtgctacagaaatgagaggaagaaaggcacctttgggctgagcctaagaagcccccagttgccttcaaactccctggagtttggtactgggacttccattggtctagctctggaagacggggaaacagggtgtgtttgtgcgcatgtgtgagcatgtgcgtgtacctgtaagctggccagcagctgaatggaaggctgtggataaacactgagtttcccaggctggcaaagctcaggctagcacaaagaagacccaggtttcatccccatcagggagaaataaaaagaatttctaattaaagactttagcccaaggtataaaaaggaaaaaaggaagcaagctgctgtaacccagcactgggagaggaggatcctagggctatttggtgagctccaggccaataggagaccccccccaaaaacaaagtgacatcgtctgaggaacacatccaaggtggacctctggcttcacaattccaagcacacattctagaagtggaatggcgagcaccgggacacacacttatcagaaacatcacaccaaccctgcttttgagcccccaccccacccacctgctagaacctcccttacagacagacccctctgagcacttaccggatgtcggatgtcagtgatcagcaggacgatgtcggacatttctaacacccgccatagctgcctccatgtctgcaaacatcagaagggagtttggcctgcagtccttctcctgccccagcccggaacattacacaggaccacaactcctgccccccaacactgttacctccaagttgtgctcaaagtagctgagtttctctgaagtgtatgccccatgtatcttcccaaggtattcctggaagctccgctcctcttggctcattagctgctccttggacatctcatagctccaaggaggacgtcggggaaagtccaggactggaaaatgaggaaaaaggtataaggattcttccttctggcagagtttctctaaataacagtcctggaaatcactctgtgcctctgcctcccggagagctgggattaaaggtgtggaccacctttactttaatccccctaggtttttcaagacagggtttctctgtgtaatactgactattctggaactcactctgtaatccaggctggccttgaactcagatttttttttttttttttttgagacagggtttctctgtggctttggaggctgtcctggaactagctcttgtagatcaggctgggctcgaactcagagatccacctgcctctacctcccaagtgctgggattaaaggtgtgtgccaccaacgccgggctgaactcagagatctttaatctttaatcctgcctttgctaggattaaaggcatgtgtcaccactaacaaaaccctgctaggcctttttttcaaactcaaccctgcatctatgatccccccatttcctcccagccagccagttccccctggctgatggcaaacaccaagtagcctctctcacctgaaccaggctgatagacttcccggatatccagctccagcatttcagtactgacaggctgtagcacttgctctctggcggctctctttctcctctccacttcctctcggctgtcccgttcgaaatgcagccggtatctgagggaagaaggaccacactcctagtggaatcctgtgaccacaatctcctctccaaagtaggcaactctgcaaagctctctcccgcggctgttcaggtctcttcttggtagccacccccctcctccccctgaaaacaaactcctgacagcccctctggaaagcaagactgtggcccatcccgagagaaccaccctggcttcccggctggctaactccactgtcaactaagccttgcccgtctttccccatggaagcgcgggtctggcgctgccctcctccttggctcaccggttgggatcgtagcctctcggccccagcccctgggaaggctgctggttgagcctgcggatgtgatgggtcacggattccccatctgaggtgtccgtctgctcctcccgtcgctcccggctcccgctgcggctgttggaactggagcgaagcccatcttgaagccctgaggggagggaccggagacgccagtgtggagaccggttctcggggtnnnnnnnnnnnnnnnnnnnnnnnnnnnnnnnnnnnnnnnnnnnnnnnnnnnnnnnnnnnnnnnnnnnnnnnnnnnnnnnnnnnnnnnnnnnnnnnnnnnnnnnnnnnnnnnnnnnnnnnnnnnnnnnnnnnnnnnnnnnnnnnnnnnnnnnnnnnnnnnnnnnnnnnnnnnnnnnnnnnnnnnnnnnnnnnnnnnnnnnnnnnnnnnnnnnnnnnnnnnnnnnnnnnnnnnnnnnnnnnnnnnnnnnnnnnnnnnnnnnnnnnnnnnnnnnnnnnnnnnnnnnnnnnnnnnnnnnnnnnnnnnnnnnnnnnnnnnnnnnnnnnnnnnnnnnnnnnnnnnnnnnnnnnnnnnnnnnnnnnnnnnnnnnnnnnnnnnnnnnnnnnnnnnnnnnnnnnnnnnnnnnnnnnnnnnnnnnnnnnnnnnnnnnnnnnnnnnnnnnnnnnnnnnnnnnnnnnnnnnnnnnnnnnnnnnnnnnnnnnnnnnnnnnnnnnnnnnnnnnnnnnnnnnnnnnnnnnnnnnnnnnnnnnnnnnnnnnnnnnnnnnnnnnnnnnnnnnnnnnnnnnnnnnnnnnnnnnnnnnnnnnnnnnnnnnnnnnnnnnnnnnnnnnnnnnnnnnnnnnnnnnnnnnnnnnnnnnnnnnnnnnnnnnnnnnnnnnnnnnnnnnnnnnnnnnnnnnnnnnnnnnnnnnnnnnnnnnnnnnnnnnnnnnnnnnnnnnnnnnnnnnnnnnnnnnnnnnnnnnnnnnnnnnnnnnnnnnnnnnnnnnnnnnnnnnnnnnnnnnnnnnnnnnnnnnnnnnnnnnnnnnnnnnnnnnnnnnnnnnnnnnnnnnnnnnnnnnnnnnnnnnnnnnnnnnnnnnnnnnnnnnnnnnnnnnnnnnnnnnnnnnnnnnnnnnnnnnnnnnnnnnnnnnnnnnnnnnnnnnnnnnnnnnnnnnnnnnnnnnnnnnnnnnnnnnnnnnnnnnnnnnnnnnnnnnnnnnnnnnnnnnnnnnnnnnnnnnnnnnnnnnnnnnnnnnnnnnnnnnnnnnnnnnnnnnnnnnnnnnnnnnnnnnnnnnnnnnnnnnnnnnnnnnnnnnnnnnnnnnnnnnnnnnnnnnnnnnnnnnnnnnnnnnnnnnnnnnnnnnnnnnnnnnnnnnnnnnnnnnnnnnnnnnnnnnnnnnnnnnnnnnnnnnnnnnnnnnnnnnnnnnnnnnnnnnnnnnnnnnnnnnnnnnnnnnnnnnnnnnnnnnnnnnnnnnnnnnnnnnnnnnnnnnnnnnnnnnnnnnnnnnnnnnnnnnnnnnnnnnnnnnnnnnnnnnnnnnnnnnnnnnnnnnnnnnnnnnnnnnnnnnnnnnnnngtctgcaagagctagttccaggacagcctccagagtgaaggtggggggagaggggcggcagggcagcgatgttgcagattgcgatgaacgggaagacaatttgtgaccacacttccactggttaggtgaaagtgcagccttctgtgaacctactcccccgagggaaggagagaagaaaaaaaaatatgatgggccaacagttaaggtgaggggttggggtgcgtggaaatcacggggcatgttgtggatgcagcactgtgagacgagagctgttacgggaacctctgttactctctctgatggaatctccactgttttgctcagtctcgaacaacactgcagagggaagggcagatggacggggtgagagatagcggcactgctgagtggatatatctgactttactggttaaaaaaaaaaaaaaaaaacgattgctaaagagcacgtaagaacgagaggatgggtccttggcaccgttctgataactgtgttttcacgtctgctcttaggaccacccagccttctggggcctccccccatggctaatggaaagcctggtgatcccaagtcaggtgaggagaaacgaacgggccctcgtatgtgttctaaatcctgagaagggttggagaaaaattcatcacaggcttttaaaacaaaagtccaggggagccgggtggtggtggtggtacaatcccggcactcaggaggcagaggcaggctgatctctgtgagttggaggacagcctggtctacaagcaagtaccaggacaggccccaaaaatacagagaaaccctgtctggaaaaaccaaaagaaaaaaagtccaggggttgtgttttaaccgatggtggtgtgttaactgtttggaaacatgattaactcctaggtctgaggctttcacagtctgtctctattccagttgtgtagagatgagcattgtccatcatagggaaacagaggctctcagtgggacacaaaactttggtgtaaactgcagtagtatgacattgtggttttcacagaataatctctgttaagtggtactgcttgagagactgaggcaaaagggtcaggagctcctgtccagcctctcctaagtagcaaattaagaccagccagcctgggatacatcatgagctcctgtctgagtggaatcgggggcttgtgaatatatgatcacttaggtgtaaagctgaaaccagagaagtggctctgtcaagtgatggcacctcaatcggatatttatgtatgaactttgaccttgtagtgaaaccaaataaaaacatcaagtctgggtaaactgtaaactaaacaggaataagcaaaaggaagtaaatgactcatggcccccgagtagctgagtgtttaaaccacaggaagaagggctgggagttgaagatcagcttggcctgcataagacactgcctttacaaaaaaggggtggtaggagacacacacacacacacacacacacacacacacacacacacacacacacacacacacacacacacacgagtggggagcggttgcgttgatgaagtgctggcttcatggggtcttgtcaaaagctgggtccagcagagtgaagagtaggcagagataggaagggcagggtttgctatggcttgtgagcatggctaaatcagcaagttccaggttcggtgagatcctatcagtctctggcctctatgcaaacacgaacttgtgctgatcataatgtaaatgggactacatcaaatactgtcaattacacccttttgcctcagtctctcaaatacatcaatttctgtcactctaataacactgttggccagccatgaggacacatgactactcttagtgagcaatatagaaatttgttagaaaaccaaaaattgctgggcattggtgttgcacgcctttaatcccagcactcgggaggcagaggcaggtggatctctatgagttcaagaccagcctggtctacaagagctagttccaggacagcctacaaagccacagagaaacccggtctcgaaaaaccaaaaaaaaaaaaaaaacaaaactgaaaatagccaggcattggtggcgcacacctttaatcccagcactcaggaggcagaggcatgtgggtctctgtgagttccagaccagcctagtctacaagaactaattacggctaggcagtggtggcacacacctttaatcccagcactcaggaggcaggcggatctctgtgagttccagaccagcctggtctacaagaactaattacggctaggcagtggtggcacacacctttaatcccagcactcaggaggcaggcggatctctgtgagttccagaccagcctggtctacaagaactaattatggctaggtgttggtggtgcacgcctttaattccaggaggcagaggcaggtggaactctgtgagtttgagaccagcctggtctgcaagagctagttccaggacagcctccaaagccacagagaaacccttgtctcaaaaaaccaaaaaaaaaaaaaaaaaaaaaaagttaaaatagagaaaacaaaaaaaaaaaaaaaaaaaaaaagttacaatagagctaactgctgcagaagccagcagttctgctttgagatttatatttgcgagatttgaaagcattggggttggaacttttgagacagttgctatgtagcccaggctgccatcaagctaacagaatgtatgcattcaagggatatttcatcctacaaaggaagaaaatattagtgccacagcatgggtgaaccttaagcacactgtactaagaaagtgcatgagctatctaaaatcagattgatagataccacagaatatcgactcctggggctgttgcaaatttaaggaaagggcttgttcaaacaactctttcatagcatgtgaaccatatacttaaaaatagcagatttggaggcagaggcaggaggatctgagttcaaggccaccctggtctacaaagtttcaagccagagccacacagaaaatccctgtctagaaataaatagttgagctgggtggtggtaatacacccctttgatcccagctcttgggagttcatgatctacagaacaagtgccaggacagccagagctgttatacagagaaaccctgtttcacaaaaacaaaaaagaaaaaaaaaaaaaagttgaggtgagtcaggctctgcaggtaaaagtgcttgccagcactcctgacaacctaacttgaatcctcaggccccatccattgtacaaaagatgaattttcctagctgttctctgtcacacatgcatgcacattgatgcctgtgtacacacacacacacacacacacacacacacacacacacacacagccaacacacaaataagatagaatgtttttttttttttaaagattttatttatgtatacaacattctgcttccatgtatatctgcacaccagaagagggcaccagatctcataacagatggttgtgagctaccatgtggttgctgggaattgaactcaggacctctggaagagcagtcagtgctcttaacctctgagccgtctctccagcccccaagatagaatgattttaacagtctctttcttggggctagagagcagttaccaagtggttaagagttctgtggctactattgcaagaggagctgagtccctttctttgcacatggcagctgactgttctagctccagttccaggggatccagtgccctttctttggccttataggcaccagagtgtggtgcaggagcttgaatacactgtactcactttggagcaatatactctgccacacatatcctgtagctgcacactggatgcccacgtccatcagtagagtggacaagtcagttgtgatagaacgctacactgccaagaagaccaacaaactaccactgcagacaaacctgggtgaaatctcaggattcatgaaggaagccagagttcaaaaccaggcagagattcacggccgtgtcaccttagaagttaggctggagatttagctcagtaatggcctagcatacacaggctcttggtgattgataggaacccaggtaaagatgtggtagttgacttgtgtccttgcaggatgtgtcagaatgctttgctgcagccagtgggggaggggctttgggcagggatcagctgcccagcagtcaccctgtctttctctctgcagctcttcacaggggtcctccagggtcaaggggaccaatgattccaccactgctgagcctcccacctcctctccggggcagaggccctattcgaggaggccttggtcctagatgtagcccatatggtcatggttggtggggtgtcaatcccgaacctccttttccccgaccaggctatgggggcccctttagggaaagctttcacacagagccaagaaatccacaaaggttcaaaagctggtctcttaccaagaccatctacccacccaaggatggcccccacatgatagaaggtaaggccggccctgttaacgcctctgccttgtcctgaatgccagcatgctctccctggtctcttctcctttgggcagtacctgagcagcactgataattaatgtgaggcctctcctggactaaggactcctccaccactgatgccagcttcttagctggcacatacaagtagtccctgatcatctttcttcccttagaatgtctctccaaaatacttggtggtctgggagtcttgctcagtggttgagcaagttcaccattgcatgcctaaggctctgtgttctacccctgacaccaaaaccagaagaagtcaaaatacttgtaaaacaatgtgtggtagagaccttggcttgctctctgcactgtttcaagctctttcttgggattgggggtggagagtaggggaggaaaagtgtctccgcctcctgcttgctggggtcagggtatgagccacctcgtccagctcttgctaggttctaagctgtcgttctcacttgttcacagacaagtctgaccgccctgtttgccgacacttttccaaaaagggccactgtcgatatgaagacctttgtgccttctaccatccgggcgtcaatggacctcctctgtgagactgtgcctccctcccacccagtggccaggcatcccctgtggctccctcatagctacttgaagttcttcttcacctccagtcagtgacatgtgcaccccattcatcatttcccccgtttggggtccagagttgtgattgtcactggagtgcggtgcgtgccgtcttctgatccaggctccagagaccatcgggaccccgtcttgctcccttccactgcctcctggatcttcccctctggcaaatgactgctgaacaggaaacctttggtgctgtttgttgtgcatctgcccccaggagacaccaccccacccaccccctgttgcagtcctctgtcctttgctgcttgtttgaagtcctttggcgtgaagcccccaccggtgtttgagctgcccatgaaatgcaccgggttgtctggccgtggggtcaggtttgagtgactggtacaggcttgctcccccaccagcctccctgcccacctcccttgcttttggacgtcctagtttcttgtcagtagcatgaaccccaccgctaaggcctgtggtcagtgttttttgtgaaactgtgctcccctcgtagccttcctcagtgtctgacatcttcgtgacttcccagcactagataagtttctctgccaaatggagcgaggctcttggtgccctgtagactttgcctacctcccagcatgggagactgagacttcctccccgaccgtctgttgtgccctctctcctggtgtcagttgtcagtcgttctgggtctggtgaagcctcaggcgggcatcaccacccagctcctgcctggctcgtttcagttaggccctgtcattgtgaggccaccagcccttcatttgaatcctgtgactccacctggccttgtcctgtctttggtggaacctggacggtagtagtgtcacctctcaccctctcccctcacatccctggtattgggtgttttctgtgaaaacagcagtgagatgttgggtgttgagctggccctaaggaaggccaggaggtgtgggcaagagagtgagagttggtttgttttttttttttcctttttaattttttttatattagtaataaatacagtggaaactggtgtttgcccctcgattctgtgttgtggtcatctgaagtacaggtgaggcagctaggagtccactcaccccttagttcatcggggccagcagcacagttgcaccccggaaacgattggaggagcagattcggcagtggcaaggagttgaggtctgaagggtacccaggaggaggaggaggaaggagtggtggaggaaagagcaggagaccttggatttgggtctaaaagctaaatcagaagagtaacaattattttgtgatccccccttgtaaatcaaatcgtttagttctccacatgaactttgtagataacagtgccaagttgtgtaatgacttcttgttaagagcttggacatgcctgtctcctcaggttggggaacagacttggaaatggagttttttgtttgtttgttttggttttttgagacagggtttctctgtggctttggaggaggaaatggagatttttaaaaatattttttaatttattattttatgtgtatgaatactttgcctgtgtgtatgtatgtgcctgccgtggaggtcagaagaatgcatcagatcctctgggactagggtcacaggcagttgtgagcccccatgtgggtgctgggaatcaaacctgggtcctctgcagagcaacaagtgccatgtccccagcccagaaatgacgatataagttactgaaatgacacgacagagctgcaatggtggtgtaggtttggataatggagttgggaaaatgatgtttggaacaatcaaaatgaaagcatttggagcaggagaagatggctctgcagttaaagcctgaatctggtgcccagaacccatgtcacttccagaggattcggcgccctcatctgacctgagagcaccaggcatgtactcagtgcgaacatgcaggcaaaacacatgagtaatttttaattttttttaaattttatttgtttgttctgtatacaacattctgcttccatgtagatctgcacaccagaagaaggcaccagatctcgtaacagatggttgtgaaccaccatgtgggttctgggaattgaactctggacgagcagtcagtgctcttaacctctgagccatctctccagcctccaatttttaaatttttaaaagactttcaaaagattgagcttggaagctcaggggcagcggccagcaaaggagggacaaggctggctccagatactaggaaaaagtatttgagaaatggagagaaagtgacaactgccagatgtgctcggagaacaggacaaagaccattggtgtctgacgtgtgggtattgggacagaagcatcataggggctgggaatatggctcagacggtagtgtttgatagtatgcttgaaaccgtaggttcaattcttagagcatataaataggggctggataggtggctcagcggttaagagcactgactgctcttccagaggacctgggttcaattcccagaacccacatggtagcgggcctaataccatcgtacagacatccacacaaacaaaacatcccaatgtatataaaacaagaataaagtattttcaaacactttttaaaaaatataaataaaccaggcatatcaacacaggtgtgtggtcccaatactcaggagggaggtggagaaaaaaatggggaatccaatgtcgtctttggccacttagtggacttgaggcaagcctggagaaaaagaaaagcatgactaaggatgggagctgacccagtcattcattagagttagaagccaacctatcttttaaaagacatgtgcttcaaagtaggcagaggcaggcagatgcctgagttcaaggccagcctggtctaccgagccagttctaggacaggcaaggctacccagagaacccctgtcgaaaatcctccccccaccacctccccaaagaggtatgtttatcaaagcttaccaagtgttccttgcttgcctgccgttttattgtattgcaattgcagtgagccaattagagcaaaatgatcgcacatctacaggagcacgcccttaatcccagcactcagaggcaggtggatctctgagagtttgagatcagtcaggtctccagagcgagttccaggacaggctccaaagctatacagagaaaccctgcctcgaaaaaccaataaataaataaataaaacgaagaggttagaaagtagtgggaatgactggagaggtgtactgatttaataaagtgaccagtcaggcataatagtgcagacctggaatcccagctctcccaaaggcaataggcgagcagaactcgaggagtttccaggccagccaagtgctacacagtgagacccaaaacaacaaaaagatttagagcgggatgtggtgaggcacaccttaaactcaccattctagagccaaaggctctctgggtcggatcggaggccagctcagggtgacacagtgagataaaagctgcctcacccactccctcccacccagaaattacgtcgctccttgggtgtcaccgcgtcgccacaccagcagcggctcaggcgtggggaccgtcataacgcgctgcgggctnnnnnnnnnnnnnnnagccggccaggcccagggcgagcgggctgccccgagggttaaccctgcgtgggtcaggacggacaggggcacggcactgtcagcgttgggcgatgcgccgcgggcgcgggatggagggaacgagaactcttatttaagaggcaccaagtcactccatggggaggtagaaaagacgcgaaagaaagacgacggcgatcccacaggcgtttgatcggttgtcgttggaacgaacttttattgtttttaaaagacaagggtctctctacatagggctggcttccctggaacctcactctgtagaccaggctgtcttctaaaatccgcccgcctctgcctcccaagtgctgggatcaaaggcgggcgccaccgccagaaccaccgccaccaccacgacccggcttagttaagacaaaatcttaggtagccaaagccggccggatctcttatgatcagtttattacagcaacagtgaaaagtggagggtggcttgggtcaagatagactcgggaacaccgcttacccaggctctggcagtgacttctgtaagaagggcaaggaaacagtaatgccttggagacagaagtgtcactgtccagtggcctggaccacacccagatactgactagataaagggtaaagactgaagaattccactctattagtcaagatgcagttaaaggaataggtaataggctattggttgataggagtacttgaaaaaatatttttaattaaaatatttttgtttttatatattttttaggcagggtctcactatatagccttgactggtctggaactaactttgtagaccaggctggttggaactcatagagatccatgtacctctggctcttgaatgctggtattaaaatttgcaccaccatgtctagctggtgggggagagaattacttatgtgaatgtttactttgtactgcatgcccagtgagggcgttgggtctcctggaactggaattaaagagggttgatagctgggaactgaatccaggtcctctgcaagagcaagcagccagtgctcttaactgctgagccatctcttcagacctggaaataaaaccgttttttgttttgttgggttttgttctgggttttgattgtttttgttttgagacagggtttctctgtgtatccctggctatcctggaatttactctgtagaccaggctggccctgaactcactgaaatcctccgcttctgctgctgaagtgctgggatccccctgctccctgaaaataaagtttttaacaagaggggagggtattggactgtaaggtggaaaacatttaaagagggtgtggggtgttttgttttgttttgagtgtgtgtgtgtgaatgttttgcctgcgtgagcatatgtgcaccgtgtgcgcgccttgtcagaagagggcttctgatccccagagactggcgttacacttggttttgagccaccatgtgagtgctgggaatcaaacctggaccctttgaaagagcagccgagtacaccaaactgctgagtcgtgggtccggtgcctgagtcagtgttttcctgagggaggagcaagtttggtccggaagtcagtggacaactttgcaggcagttgcacctgtgtggaggctccggggattgaacctggctctttgagctgatactctccatgggagccaccttgccatcccagtgtgctttgaaggttgagttggaggtttctaagagataacaaagacaaatggccagctatctctagtgagggaagaattgaagtagttatagatgaagcagcctagacagtgcagatgggagtgggaacctcaagaacctccccaataagggttagtcagtcagcacagagggtgagagcatggctgcaagagcagccagagaaactagaggcaactgaggagacagacagtatcacctggccaaaacacaaacaaacacaaggtatttgttaagaatccatacccagtggggtgatggcgctcacctgtgcacttgggaggcagaggcaggttgatctcaagtttaaggccagcctggtttacatagtgagcatagatagccagggccacacagagaaaccctgtccctgtgtaaacccagcagaaaagaaaaagaagtgctacccagaccagactgctagccctgagtgtttaggatctacaggaatggattaaacactcgggcataggatgcaagtctaaacataaaattcacttttgcttgatttacactttataaacacagatgagaggttttttggttttattttaacacaaggcctattactgcccaggctggcctttaagcccatgtacagccaggaatggtcttgaacatgtgttgctccagcctgagccttgaagtgttggtggtacagacttgagtcattataaccagctataaagtggagaatagccttgagccggtcaagatagtctcctcctccgctcttgttcattttgagacagggttcaaacccagttctccttcctcagcctgcctgttaacctggattacaaataatgggccaagagtgataacattaaagcatttccttttgctttgaggctcaggacaacttaaggtttggaagaggagagatgcagtgcagctccggtccgctgacctctgtgatatttatctcctcacatttagaatttagagaatggagctatgaagtcaggcgtgctggctcacacctttaactctagcacttgggaggcagaggcagatccgcctgcctctgcctcccgagtgctgggattaaaggcgtgtgccaccaacacccggttgtcctaattttactaatttgaggtggggttttttggggggaaggttggttttgttttgtattttttggttgtttttcaagatgggggtttctctgtgtatctttggagtatctttctggacttgttctggaagtcactctttagaacaggcgggcctcaaactcacagagatccaagtgctgggattaaaggcctgtgcaaacaccgcccggctccgttaggctttgaaactctaaaatagatttttcatatctccagggttgttttgttttgtttgtttgtttgttttgtaggtatttagtaagactttcctaataaataaggactatggaacacgtggaattctgatctaagaatacttgtggggctgaagagaaagaaggctcagcagttagcacttcctagatgaccttggttcaatccccactcccagctaggtatagctctagtcctgtaagatctgtcgccctctcctggcccccttgagcaccacatgcagataaaacacccatacacataaaatagatgtatttttttttttaaagaatgcagtgatagcagagagctgcttgtgtgtcacaggactgagtaccaaactgctatgagtgagtgtggtcattcagaagacatggttgtaggcctggccatgaggggagtcgtgtgatcccttctgcctctggatggagagtggcggttgctcgtagaccgctgcctggagtgacacattgggcaggagtggaatcagtctgactccctttgctccctgagagacagatggtctttcggtcactctctgggatgcaagaccacacaggaatgtacttcatactgcatgtctgggcacctctccaccctgtgcattctgcccccgtccctctcctccccccataaaaatactgaaatagtctcagcagatttctccgattttcttgtcccctcccgtccttgccccactctgaagtggatgcaagacttgaaggtgcaaaagatcatgcaacacattgtggttccttacccgactaaaaagcccctgcctgctacctgatgctgttccgtttgacctaggtgtgccagctgtgtgtttcttctttctcacagctgatctgaacatgtcactgtgcctgacagcttctctaggcttagccagctgcctcctccacggggccatgcttggctctagacctgaggctagcctctctccccaccagatctgccctttcttccccttgggcaagttcaggaactgtctctgtaaagacctgtcttccaaaggcctacaagcactgggggaagccaccgtggtcttattcgctgcttgcacccccagtgcaagcattttctgacgcctcatgtctgtttaataaataggtctttgtaggacaggacagatggcgaatgatgacaagcacttgctgctcttgcagaggacacgttcatggtggctcatgacatccgtaactccagttaggtgggatggtaggctcatagtgcacatacacacgatacttattttaaaaaatctttaaaaatgccttaaagtaataggtgtttgtgtgaatggatgaaagtagaagtgattgtttctgtaagaccagggagtgatgaccagactagttcttcatggtagagccagttggagctctgcaggaagcttggactgctgggcattagaataagctaatgtgatgtctgtttaaccttccagagaaagtggtgaagaaaggcaaaaaggacaagaagaccaagaagacggtgagaaaatgggggtccgggacaagaagtgacgtgggtgttggttcccaggcagtgtagatggccatgtgaagtcaaaggggggatctccctgggagaaggtgggtgggttgtttcattaactcatgaagcaggagcacatgggctcatgtgaaattctcaaagagttaatttttttaaatttattcatttttattttatatgcattggtgctttgccatgggtgtcaagtcgtctggaactggaatttcagactattgtgagctgccaagtgggtgctgggaattgaacccaggtcctctgaaagagcagtcagtgctcttaatgactgagctgcctctccagctccaagagttaatgtttttgcgacagggattctctgtagctttggaggctgtcctggaactcactcttgtagatcaggctggtcttgaactcacagagatctgacggcctctgcctctcgagtgctgggattagaggcgtgggcaagagttaatatttttaaaaactcaaaaagatgtgggcagtggtgatggtggtgcacacctttaatcctaacactcaggaggcagaagcaggcgaatgagtgagtctcttgggttcaaggcaaacctggtctgcagagtgagttccaggacacccagggctacacagagaaaccctgtcttggggggtggggcttgcaaagagcaaatactgctttcttgcagttgtggaggttgagaagtatcaatggactcaaagcttcggtgggcatgcgtgtatcatcctttgtataaaagtggaaatgaaaggccatggggatcaaacatgagtgagagccagcatggtgaattaaaataaaaacaaaataatcaaacatgagtgagagccagcatggtgaattaaaataaaaacaaatgaccactggcacttttaaatgagagagcagcaagatgaggagggcctgcatgcagatggctaactagcctttgaacagcttgcctgtgtctcaccctttgtagttctttgaggagctggccgtagaagataaacaagctggagaagaagagaaaacacagaaggagaaggagcagcagcagcagcagcagcaggtatgctagatgggctggggatgccagggcaccatggacccagctgacaggacctcagccgactctcacactctcatctcagcagcagaagaaaaagcgcgacacccgaaaaggccggcggaagaaggatgtggacgacgacggggaagaggaggagaaggagctcatggagcgtcttaagaagctctctgtgccagccgttgatgaggaccagggtaagtttcttgaggggacactcggaggtggtggcacaccccaaacttagactgaggcagaggatctcttgagttcaaggccagcctggtctacaaagcaagttcagtgtagccaggactgttacacagagaaactctgtctcaaaaagaaaagaaagaaacctgaggggtagaggacatttgacatccttgattggcagggaataaggcctcatttcttgcaaggtctttgagttggtgaagtgaaggagccaaacactggaatgttcctgaccgcttcctttcccctgtcatttcagtgtctgccccggttccccgaggagggaagaaagccaaggtgagctgtcagtaggagagaagactcctaagggcagtcgcagccccccccctgacttctgtggcctttccctgtagggtgggaatgtttttgaagccctgattcaggatgagagcgaggaggaggaggaggaggaggaggaaaaacacgctcccaagcctgccaagccagagaagaatcgcatcaataaggtgaggtggtggctccacccccagggcctcctcacagacaagccagtttcctgcttgtaagccacctcatccacatgtgccttgcccgcgccagcagaacccctctctttaacgtcatcagtctgtcagtcatgtggtactctaagagatttaaactcagaatgtgaagcaaaggccctctgcctgcctcttctcttccttttgggacactatttatgctcagcatctggtttgcctgcacctgctgctgctcctcctcagcagcctcctaacccatctgttgagtcccccgtgtcccgtgaagtgtggcaggctgaaatgctggtaaggggcagagtagtgaagtcatctgttgtttgtctcctgcaggctgtatctgaggaacagcagcctgggctcaggagcagacggggtaaggaggagaagtccaaagcaaaggccaaggtaagagtggctgcagggggtgccgacagctctcctgggtggggcatttcatcaggtctgtcttttcctcattagcctcaaaataagtttgcagccctagacagtgaggaggaagatgatgaagaaacaactgaagagaaggagcctcccaagccagggaaggacagagaaaaggccaagaatgcagagcaggtttgtatcttgcggggtgggattggggtgcagtctgttgctgatcagaactcgggtcacagactttgtacaatgaggcactgacacccagcatagtggatcacacctttaatcccagtacttgggaagcagaggcaggtggatctctgtgagttcaaggacagcctgatctgcatatcaagttccaggacagccagggctacacagtgtctgtctcatcttccattttatcccatgggccacatgaagaccaacaggcattgggtcaggcttggcccagaggccagcgttacagcactggatggaagaggaaagggcctggggttcgcctctgatggtcttggtcctgcctgtgccaactgttgactggcgctgtgatagagaacacatctggccgtgctcctggtccgttaccacaccggtgtgctgtagctctccgtacctcaagcaggtgacaccctcaggctgcacactgcacatgtgttcttgacatgttagacaaactcatttgctcccaccctctgctacacttggaagttatgtcatttcttacctgtggttcctggtggcagacattgacaaaggactgcatgcagaccagtggcttgggataattaggagagaggaccataacccatctccagtctgggtggagaagacagctccctgcatggcaggaatcttgaggtttttgtttgttgttgttgggttttggtttttcaagacaagatttctctgtgtagccctagctgtcgtagaactcactgcctcaggttctgggatggcatgcgccaccacacccggcagagccggcggtgtgagaaatccttagtccttgatggtgctgctgctcttgtttgtttatggctgtgtgttctcacagggtgaagaggaagagggagaagaggaagacgggaggacgaagccaaacgacccctatgccaaccttagcaaaaaggaaaagaaaaagctaaagaaacaggtcagcattggtcttcatggtttccgtgggtttgtaaggcgaggtatgaagagagctttgggggctgcttgaagtagagcggctgaaagggggacagaattgtgtccttgagccctgtctcagccatggcaatatggacatcaaacatcctttccctccttctcagatggattatgaacgccaggtggaatcattaaaagcagctaatgctgcggaaaatgacttctccgtgtcccaagcagaggtgtcttcgcggcaggcgatgttagagaacgcatctgacatcaaggtggggtctgagggcccttgcccattgtttacttgagcagaggcctgccctcaccgtgcctatgggctgttggcaaacaagaaggcatgtgaaggggtgggtgccctaaggaaaaaagggtcctgctagcttgagcaaggtgataggaaagccaatagaaaaaagaggagggaaaggggtcagagggcccgccttccaaccccaccgcagaaaggggtaggtagggtcagggtcagggttgggacaagcaggtgtatgcatgtttgtcctgggctcattcattctgttggctgcagttggaaaagttcagcatctcagcccacggcaaggagctgtttgtcaacgctgacctgtacatcgtcgcaggccgccgctacgggctggtgggacccaatgggtaagaagatgggactgaaggggagcaggagggttgcactgggtggccaggtcctcatggcccttgttctccagcaaaggcaagaccacgctcttgaagcacattgccaaccgcgccctgagcatcccccccaacatcgatgtgttgctgtgcgagcagggtgaggctgggggccgggacggttgcaggctaggggactaagggctggaggacacctgatgtgctgcacgggtctggcaggcaggactggcattggcctcttgaccttccccgtcctgcagaggtggtggctgatgaaacgccagcagtgcaagctgttcttcgtgccgacaccaagcgactcaagttgctagagcaggagcgacagcttcagggacagctggagcagggggatgacacggctgccgagaaattagaaaaggtagaggagacagcgtaggggacacaggtaagccttggggggtccttggacccttggccatgtgtcctcttctcctcctccaggtgtatgaggagctgagggctactggcgcagcggctgcagaggccaaggcgaggcgcatcctggctggcttgggctttgaccctgagatgcagaatcgtcccacccagaaattctctgggggttggcgcatgcgcgtctccctagccaggtgggtccgacctctattctgccagtgtctcttccctttcctttcttccaagggctacttagcaagcaggtttgaggccagcgttcaccatcctcacttgtgcattgcgagaacttgggtcattctccattttgatccctatctaataaaaattctcacatagttttccaaccaggggctctgggtttgctgaacagatgccttcctctcctgaccttgactccactcctctccagggcactcttcatggaacccacactgctgatgctggatgagcccactaaccacctggacctcaacgctgtcatctggctcaataagtgcgctcactgccctgcccatgctctcagcctctgtgtcattggctcccacgcttcttcccctgtccccaccctattgtctgcactctgggctcacacccttgtgacactccacactcctgtctacactgcagctaccttcagggctggaagaagacgctgctgatcgtctctcacgaccagggctttctggacgacgtctgcactgacatcatccaccttgacacccagaggctccattactacaggggcaattacagtaagcgcgcctgcccttggtggcttggggacaggtggcagagcctcagtagcagcccctgggcatggtggtgagctgtctcctcaagacctccataggtggctgcttccccgttcacctgtccctggttgttctccaccccagtgaccttcaagaagatgtaccagcagaagcagaaagagctggtgaagcagtacgagaagcaggagaagaagctgaaggagctgaaagctgggggcaagtccaccaagcaggccgtgcgtgcccacgctcgcagaggagggcaggagggcaggatgggagagcccatgggactgggcggcgtctggagcgcttccttcctccctcatccaggagaagcaaaccaaggaagtcctgactcgaaaacagcagaagtgccgacggaaaaaccaggacgaagagtctcaggagccgcctgagctcctgaagcgacccaaggaatacaccgtgcgtttcaccttcccagatccaccgcccctcagcccacctgtgctagggctgcacggtaagggcgccctttcctttggggccaggatctggggtgactgcagagattataagtagctgcttatcctcaggtgtgacatttggctacgagggccagaagccactctttaagaacctggattttggaatcgacatggactctcgaagtgagtttgtcctgggtgacttgggtggcagcaggagtctccgattgaggctggttctctgatcacccatccgtctccttccagtttgtatcgtgggccccaacgnnnnnnnnnnnnnnnnnnnnncccttctcttgctgctgactggcaagctgacaccagtgagtcctaaagccaaaagggagagggaagggcccagcattcaccagatgacaggggacagtgtgtccttgttagactgattagaagtgtgtggggtaggggtggggtgcagagacggagcccagaactttggcttatctgttagagctaacaagtctgaaatttatcccgttgccgttctgcgctgttgagactggctcctcacaccacatcgtagggttggttttgtcatttgtaatactggggttgaacctagggcctttagcacgttgtagccttcatcttgttttactttttattttaagataaggccttgctaaattacccagagtagcctcaaatgttgccatccctgtcctttcttagcctcttaagtagctgggattacaggctgatgccacccacctagtgactggactcccagtcactgcaaggaaatctggaggtctccttcagtagtgccctcctcaccctacctctacctgaccgtgtacccattgtttcctatgtgtgtgtttgttttccgagacagggtttctctgtgcatgtggttctggctgtcctggaactcactctgtagaccaggctggcctcgaactcacagagatccgcctgcctctgcctcacaaatgctgggattaaagtcgagtaccaccaccatcaccaccaccccagccatttttcctttcttgtattcatttattcccagcccaactatgagatttgtttctcctaagaaaacattgaggtagcctggtggttcctagtcaaaagctcagcactggggagtctgagacaggggcaatcactgtgaattcaaggctagcttgagctgcaaaataagactatcttaaaaaagggagggggggggctggagagatggctcagcggttaagagcactgactgttcttccagaagtcccgagttcaattcccagcaaccacatggtggctcacaacaatcttgaatgagatctggtgccctctgttggcatgcaggcagaagactgtatacagaataaatatcttaaaagaaaaaaaagccccctccccaaaaaaaaaagaccaagaagatattaaaaaaaaaaagaggaagagagggagggaggtgctagagagatgactcagaggttaagagccctggctgctcttccagaggacctgggttcaattcccagcaaccacatggtggctcacaaccatctgtagtgagatctgtaatggtgccctcttctggcctgcatgggtacatgcagacagaacacagtatacaaaagaaataaaatttaaaaaggagctgggcgttggtggcgcacgcctttaatcccagcacttgggaggtggaggcaggtgaatttctgtgagttcgaggccagcctggtctacaagagtgagtgccaggataagctccaaagctacagagaaaccctgtctcaaaaaaaccaaaaaaaagggggggggctggagagtggctcagaggttaagagcactggctgctcttccagaggtcccaagttcaattcccagcaaccacatggtggcccacaaccatcagttatgagatctggtgtgcaggcatacatacaggcagaacattatacataataaataaatgactcttttttaaaaaacattaaaaaaggaaaagaaaaactgggctgtggtgtcgccgccctcccgcatccctgctcttatgcttgctttttcttgcagaccaacggggaaatgagaaagaaccatcgtctggtaagctggctgtgggactgaggtgtagaagtctggcaggaagcaggcccctgactgaccacactgaccacctcctctcctcttgggcagaaaattggcttctttaaccagcagtatgcagagcagctgcacatggaggagacccccactgagtacttgcagcgcagcttcaacctgccctaccaggatgcccgcaagtgcctgggccgctttggcctcgagagccatgcccacaccatccagatctgcaaactctctggtaggacctcctgggctccccctggagactgggaggaggaggagcccccgtggcctgaggacagagagaatgtggtttgtgtgggcaggtgacagggatctgattgcctcttccttttgtggcaggtgggcagaaagcccgagttgtgtttgctgagctggcctgtcgggagcctgatgtcctcatcttggtgagtgggcctggcacaggaaaggggcttgaaggtaagagctgcagacaggtgttgcagtgctctgccatgggtctcttcttctccacaggatgagccgaccaataacttggacattgagtctattgatgccctgggggaggccatcaatgagtaccaggggggtaagtctgctgggggggcagacaaagcagtgtggactggggctcttcttctccacgctcgattccccctcctgccctgtctttatcatctttctccacagctgtgattgttgttagccacgatgcccggctcatcacagaaaccaattgccagttgtgggtggtggaggagcagagtgtcagtcagatcgatggtgactttgatgactacaagcgagaggtgttggaggccctgggtgaagtcatggtcaaccggcctcgggattgagctcccctcctggaaaccttctgagacaagctcctgtggctggggtctctgcctgtacccacccagacgcccgctgtgtctgctgccaactcagccacatgggccatgaaggtggagtgttgccttgatgcgtgtgacaggatccgtgtggattgtgtccttcccaccgaaggactgtgtctccttcagataacagaactggcttaccctcagcatctcttgccagacagaggtgacctttgctgtggtccattcttctcaagccaagttaaggtggcctcttgtctcaagactctggccactcaggactgactctgcctggtccctccttttggaagggtcctcactgacacaagcagccggaaccacagcacggctggaggccagtgtctgagacctgttgtgtcaccaacccaagatctggtgcttgtggtggcttgtctggtgggggcttgagggcaggaaagggagctgatgaagtgcagtctcctttcagagggggggaaataaagcactggggttgctgacatcctgtccctgtgtggagtctcctcagcttttgctgttccgtcctcccctgccagtgtgccctctgtgccctcagggagggggtgtgaccgagctgatgatctaagaccaacagaccatgttgggatagggcgcacacctctgattccagcgcccaggaggtagaaggagggcttcccttggctacctagtacatttgaagcaagccttggctacaaagactcaaaaactaaggcatggacatttgtgacatatctgacttccatgtgtgtaatatttttggttaaagattgccatgtgtccagaaaggacagatttccagatttggagtcgcacttggaacaggagtgaggcccagagcctgtccacctgggagaagcaggtccagtgttcagggaaacacttgggactggtggagagaagggggaaatggggaaaacagactaaatgtgaagtgttgaaggagaaaggaatgaatggttttccagggcaaatacagagtccagtgtggaaaaattattttccaaggagtcacaagtgggatgcagtgagcacactgagtgtgaagggatttttttcagtccagccactgtggagtacttaaggtgactggttgaccttgaagctcttccatgtcttggtccagtggagctggtgtcgggggcctctgtggataatctaaactgtgacactattgcttctgctcctgcttcatccactcactccgtctagatgagacaatgcaggaattatggagtgttggtgatttagtgaatatcaaggacttggatgtgagtctgagtggtgttggctcacacctttaatcccagcactcaggaggcagaggcagacgaatttctgtgagttccaggccagcctggtctacagagcaagttccaggacagccaggatacacagaaaaaccttgtcttgaaaaaaaaaaaaaaaaaaagtaccggctgcatatctgggggacctaggttcaagtctgcaccctaacaactgtaactctcaccccagtagatctgacaccctcttctggcctgggagggtcctgcacacatgcaatgcacacacattcaggcaagcactggtgcacataagtctttgtgggctggagggatggctcagtggttaagactccttgatgctcttccacagactttgagttcctagcacaggtatctgtaactccagcttccaaggggatgcaaggacacttgcactcatgcatacaaccccacacagacacacataaatatattttatttattgcagtaaagagataccatgaccaagacagctcctaggaagcatttaattggtggcttggttacttacaatttcagatgtttagtcttatcaccatggcaggcatgctatggtgctggagtagctgagagctacatcctaatccaccagcagcaggaaaagagagcctttcaaaaggctcaaaactgagcagcacacttcctcaaggtcaccccttttcttttcaaatagttccactcctgatgactctgaactccctcatatatgagcctaccggggccattctgactcattttcatgtacgtatatgcacaggttggtgtaggggtgtggggaggtgcaaaggccagaagagggtgtccaaattccagctgctggaattcaaggcagctgtgagccacatttatcaggtgctgagaattgaagccagccccatggaatagaagcagacgcccagagtcatcactccggccccttgaccnnnnnnnnnnnnnnnnnnnnnnnnnnnnagggaaaacattgagctctctttggggagtcttgggcttgtaggagatggggagaagaagtgatggagccttgaagaggtacaagaagcgctgtaaccacaggctggttgattcccaccagcttttagccatggtacttgtgagagttaagaggttactgccctcgtgtggccgatactggaaataacactcaagacacctgcaaactcggatcctgtcaggcccctcggatggttccaatggacacacagcaatcaggggccactgttctgctgcttacatcccagactcccctccttccctaagtctgtgtacccgacaaggcccttctgcttcttttcaaatcctgttccatcagctagacacggggaaccttttctgttttgagacagggtctcactgtaaagctctggctggcctctaactcagaaacctgcgtgattccgcctcctgcgtgctggatggaattaaagagagtgtgccatggcaagtgtatggaggtcagagtacaattgacagagccattctctcccaccatatggagctcttctagactttaagcatgactgttttgcctccttgtaattatgtgatatgtgtatcacacatatgcctggtgcctgtgttggtcagattgttctagttagtgtttctattgctgtgatgagacatgactaaaagcaacttgaggagagagtttatttggcttacacttccacacctagtccatcattgaagaaagtcaaacagggcaggaacctggaggcaggagctgacagaggccaagggggagtgctggttactggcttgttcagcctgattccccccacacacacaccaagacagggttttccttgtgtaacagccctggctgtccaggaactctttgtagaccaggctggcctcaaattcagagacccccctgcctctgcctctagagtactggtataataagcaccacacctggcatttcagcctgctttcttatagaacctagggccatcagccaagggatggcaccacccacagcgtcctagcaatcgctagttgagaaaatgccctaactggcttgcctacagcttggtttcctgccttctcaagacagggtttctctgtgtagtcctggctgtcctggaactcgctctgtagaccaggctggcctcaaactctgcctgtctcttcctctggacataaaggtgtgtgccaccaccactggccagcttgatcttatgatcagttgaggcttcctcttctctgattgactctagcttgtgtcaagttgacatgaaactagccagcacaggctggagagatggctcagtggttaagtgcactggctgctctttcagaggatctgggttcaattctcagcaaccacatggtggctcacagctgtaactccagttaactccagttgagaggacctgataccctcacctacacataaatgaagaaaaaacccaatgcacatataagaataaacagacaaatgttttttaaaaagccaggaggtggtggtgcacgcctttaatcccagctctcaggaggcagatctcaagtttgaggccagactggtctacaaagtgagttctaggactgccagagctgtaacacaagagaaattgtctttaaaaaacaaaacaataacaacaaaaaagcaagagtcaaaacacagcaggggttaaataagctgcttctctttccactgtttattattaatgtacaaaatatacaaaatcaaaagaaaaaactcctcaaatccattgtggttctaacccaagaccctgcacaaaaccaacccactgttttcatagaaaacaactgatgccaagacaggggaannnnnnnnnnnnnnnnnnnnnnnnnnnnnnnnnnnnnnnnnnnnnnnnnnnnnnnnnnnnnnnnnnnnnnnnnnnccatatggggtaaggagcaagcccactcccaaaggcagtgcatgtagtgcgttaggcccggtgcgcccgggctaagttgatgaaagctggtctcacggaagtgtttaatggagtctctaacatggctgtaggcaagagtggcctaacgctgcaggcctcccctccgccagctacttttaactaggtatggatatgaatgtgccctcactgaacctggcagacccacaaagacttgggtactaacagttgcagtcttccttgagaaaggactcaacagtgactggcccatgaggggcacaagagagggtggttccagaactcaattccagccagcttgagccctcagtgcagtgggatatatggtacccctcatcacccctcaccccaaggggataatgagcttggcttggcttggtttcctaagtgcaggtgaccaactcagttccatgtgcaattggagagcagaggtctccagggtgaccagctttaggttctcaggcatcggggctaatactggaaggggtttggggcacagggcgaatctcctcacaaagtgaagccagccgtctcagcagtccagcatatagagtgtgtccagtctctctcctctccagactggaggggagtatgtacatcaatgcgcaccagtgatcagaaacccccaggaacccaaccaggtgggaacggagggggccggctcctcatcagctggggaaaaggggaagtaggcctcacagaagccataagagtgaaaggagcaaggctgcagtccacaggggtgcgggcggggtggggccggcctacggcagcgggggcccattgacccccgggtgatagaaggcacagttgttctcgtagcgacagctgcccttcatcatgaaatgtcgacagacagggcggttggacatatctgtggaaccagagcagaatggtcagaaaacagctaagaggccaccaccatccccaacccgagtcctgagcaactgggacaagccttcaaagacagtgtttggggatctgatgtaaagacagagagtgggagctgccttccttatatacagagaagacatggagatagaaccctaatgttctttctacctctcccttacaccccccaccccgcaatctggtatgagacacttaaaaatctatccatgtgtgggatgagaagtgtcctcacctcctccatgactgtggcctccatcatgccctcggtggccgcctcccccatggccatcatgaccacggtgttcatgaggtggtggacctcggtggtcatggcctcgatgactagggacatcatgcggccggtggccatgaggtcccccatgtccagggccttcatgggggcgatgtccaccaccagaacccattcctcctcccgggccttcatgggaacgatgtccactgcccattcctcctcccgggccttcatgggaacgatgtccactgcccattcctcctccggggccttcatgggaacgatgtccactgcccattcctcctcccgggccttcatgggaacgatgtccactgcccattcctcctccagggccttcatgtgggcggtgcccaccacctccaaccatgcctcctccaccaggaccccctctgccatttgggggtcctcctccagaacgacctcctctggctcctcgaaatggagggggtggcggcggctcatttcctccacgacctcctcgacctctgtggtatggtccaggaccaggtcctggacccccacgcattgggccacctcgaatggggtcacctgggccatcccagaagggatcacctccccgaggagggggtgggggacccaaaagacgtggacctactggaccaccagggcctccatggggacctgttagataaaggggaaggggaaaaaaaaaaaaatcagttatctgttacactctagcactgctgcctctaacctgaccccgtcccactttcggtgatccctggctgttgccatgctgaaaagaagcagtaagcccaccaaatccctctcacctacccctctcacctacctggcatgggccctccaggaccaggggggaaatgctgcatgcccttggggcccccggggcctcctggtgggaagccattggctacaggaccaggacctagaagtccatgtggcactgtaaatgaaaacaggagccagtcagaaagagaactcgaagaatggcatggtttcccacccaagtgtgcccaactcatctcagaccaacctggcagagccatgctctctgtccagttttcccctcccaattcttgcccagtggcaacagtcccatgctcttctgcatctggggaaccctgtttcccccctctgccacagggcatcctccccgggctcctgtggctggccctgaggattacccagcatctgcttgagcttgtctgagtactctggctgtttcagtagttcctctgaagggtggctgtttggactgccctgcgagtaggtaaaatgacagttaggagagtgactgatggccagggcaaagcaagaacatacatggaaatgcagaccaagaaatggataagctgggcacaggtgtaggctgagtcccagaccagcttgggcaacgcagtgagaccctttcccaaaactgaagcccagcactaccctaaatggaaaagaaaccaaacacaagcaaagacaaagctagggtaaagcgtgggagacagcgtgcagagctcatgagtgaggcagcggcgtcggctcacacaccatgatggaggtgaggatctcctggacgttgatgcctcctcctcctccagggccctgggggctcttcccagctcccatgcttcccataagattggccagaaccggaggcagcttggagcctcctgccccatcaggtgagccaccagaccctccaggctccagggtctcaacatacggtgcctcatccatggaacactcctgagaacagaaaaagacaaatcagagctgtggaaaacaccacagaggcatcgtcacatgtttttgcccagcaccgccggtccaccacaccagcgcctacaaagactcacctcatccaaggggatgagcttcgggggtataggctcatagggctcaggatcgggctcatgaggactgtcaggacacgcgccacaggtgaggagaaaaaaaggaatacaagcacattaattcagcccctgaagttcactgaggtgtctccctaagtccccacaacacagtcccatggtacaggcggtccacacctcaggcctggaggcctgtgctcacctctccttgttcaggaagagttcctgaaggatgcccttttcccgctcagcttggatgtatcgctcctgactattgcttccagggatgacaagaggtgagggcagaaccagaggccggggacacacccagggcactttctcctccatgttgtcatggcttagtcgcctggctgtctcaaaagcatgtcggtctgacagtatctcacgcttggctgcctcaccaaagtctttgatcttgttcacattcactgcaaggaagacagagaggccaagagaacaagtgagcaaaactgcccgtgttcaaattctggcacacccccaacgcagggaactggcatctcacctcgttcagtttcatccagttcaaagtagaaatattctctcagcttgccctcttcaggccatgtcactgtttttctctttctgccctttcgagtcagctggctgggatcaccagggctctccacaggcttcgcatccagagctcctggctctgaagaggctgaaaacaagacagattacagaagaggctgtcagcaagctaagatccagcccaagatgcagcctttcagaaaaggctctaacaaggcatcgtgggttacctgtatccatgagctctgggacttcaacaggtggcaccggggtgccaggacgatctgtgtccatgggctcagcagggggcgttggctctggggaggaaggtttggctgagctcggttcagtgcttgttttcccttcaaaagggctgggctgttaggaaagagaaagcatccagtgagcttacaggacacccaggacaacaaagccagggtcctagatgccccatggccccagcccacactctcccagaatgcaccccacacaccctgtcaccaaaacccacttctaggctcacaccttggcagctgtaggtgacagcaccttcttcttctttttaattttgatgcctgggacaggggctgaattgagagcatccaggaaacccaggccctccatagctacagaaggaaagaatagatgcaatgaattgaatgaacttcttcacaattctattcctgcagagtccaggaagaagacaaaagcacgcctgtggggtccctgcccacggtgaccaggaagcaagctttgcacaggaaatcccctttctcccatctttcttttggcagctatgtctttgatgacaattctagaatcaattcattaagcaagctgcacaccagagggtccagccaggaaggagatagctgacaaagttatcatttgagaggggcatggcttcttgccacttatctaatgtggaaggggaaatccctacaaaaaatataggatgccaaaacattaaaggcagagcaaggaaatggctgacaggagaatctccccccttcccacccagaagcgctttccttgtgccaagggccctccaggaggactcacgctgaggggggatgatcttcactttgatctctttggtggcgttgggggttgtgttgaggggcttgtacttcttctccgcaggcggagcagcatctcctggagcagctgtggcactctgccgcttgagggggatgggcttcaggttgtacttgtctgacaccaccacagtgctggagttcttcttcacaggcaccaaagatggggtgtccagctctagtcctggggagaaacaaggtgacagcagttagcgccaaccttcactcactgtccctccctcttgacacccctagatgttctagccttgagtaagtgccccggcttctcctttagccttctttcttcctcagagtttgaaatcacaactaaaactattggctgtgcatattgatggtactgcaaagctggctagcggccttaccagtggagcgaaacttggcgtgactcggtgctgtggttcgcagcgacttgggcttttccttcttcttctctggagcctcctcagccctggtctcggttttcacctcagtcaaaggtctctcaggaagcgtagttcggctttttccctcttccttccgtttcttcttatctttctctgttgtggaaaaacaaagcaggtaagaatctcatttaggaggcagaggcaggcagatctctgtgagtttgaggccagtctggtctccagagaaaacctaccaaaaaaacccctttcccaaaaaaccaaaaaaaaaaaaaaaaaaaaaatctcatttagataagaagactggcagaggcgaagaaccaacctagggtcaccctagagctgcctcttatgggaaagaaaacccctgaggtacagagtcaaggagcttacctgcaggctgggcactactttgggagcggatgacagccatccagtcactaacgaggactgaggccaatttccggagctctgcaggtaagaaaggggaaaaaattacttatttagtaataattcaatatatttccagtaacagaaaataggatgtttacaaaaaagaaatccattgttaaatctgttcgatgggaataacttgaattttttttttttttgaaagatttcaaaagtgttctgtctgcatgcatccctgcaggccacaagagggcacaagatctcattacagatggttgggagccatcaggacctctggaagagcagccagtactcttaacctctgagttatctctccaggccctcaaatccttaagaatatgacatgcttaaaatagaaggaaaaaaagtctaaggcagcccccccccactccttgctgttggggggcaatgacttcaatcaaggtgggaaggtgaaatgagaacagtttacatagagaagaaagatgcctaaaaatctaaaggactggatttatctccactctgtgagaacttttttgtagccttccctggaggaacatggccagcagaaactcttctttggtacttatcttctccaatcatgcagacacatttagcaagcaagatggccacacaccatatagacctgtctttctgtaacagccacacagctgtgacttctgtctcacagcaatgagcatttcatgcatctacagaggaggaagatctccaagcctgtttgcagttgggcatgggacacctctaacctcaacttgggaggcaaggcagaggcagatggatctgagagttcaaagccagcctggtctacaaagaacaaatcaaagatggatggcaatggcgcatgcttttaatcccagtactggggaggcagaggcaagaggatctctgtgagttccagtccaggacagctatggttacacagagaaaccctgtcttggaatccaaaacaaaccaaaaaactctctattcaggggccagagagatggctgttttattcttgaggacatggtagctcctaagtgtctgtaactctagttctgggatctagggcactctctggtctccgtctcttcatgcacaaggtgcacagacatgcatgcaggtgaaacatcccacacagagaacagtaataaaacaacaccctctattcagagtgggaagcagtataagctagctggaagcaggtgacagcaaacccaacagtgaaattaatgacatcatccatcctctgtgtgatatgttctctgaattactaagggtacactgagatatcataaaagttgtaaaatgctcagtatctcaaagaaccaaatactgagaattaataaaactaaaaaaggtggatagctagagtggtttccacttaatacttaggttcttacccagcatgccagggtaccctggggttgggtaacatgtaaacacacacctaacactcagtattgtgacaaaaagtaaaatgggctggtgcctcatgcctttaatcccacacttgggatgcagaggcagtcagatctgtttgaggccaaactgtcctggtgagttccaggacagcaaagtctacacagagactctgtctcccaaaaagaaatagaaaatggaagggagggaagacaggagtaaaagacaacgccatagtacagagatggcagggcatagctcaggtccagggcggacactggcacagtttgggcatagctcaggtccgggccgacactggcacggtttgcacactgcacccaccttcatcctcacttgacttgctcagctgcttcactagttttgctgtgttgttctgtgagaaggaaatgcagatggtaaatgccaggaataaaacaagctcactcagcactaagtaaagtttgggcatannnnnnnnnnnnnnnnnnnnnnnnnnnnnnnnnnnnnnnnnnnnnnngtttgggcatagctcaggtccgggccgacactggcacagtttgggcatagctccggtccaggtggacactggcacggtttgggcatagctcaggtccgggcggacactggcacggtttgcacactgcacccaccttcatcctcacttgacttgctcagctgcttcactagttttgctgtgttgttctgtgagaaggaaatgcagatggtaaatgccaggaataaaacaagctcactcagcactaagtaaaccaccgactgacagtgctggcctactttaacctccaaaacctgtagttttctttctttttttttttaagggtctgcctctctttgtaatccctcactctgtagaccaggatggactcgaactcacagagtttaagtcctgcctctgcctcccgagtgctgggattaaaggcgtgcaccaccaccgcctggcacccagatacattcttaattattgccagagaaacccaaaagacagctcagttagtagagtactagactagacccagttacaggccaactcactcccactttagagatgaaaaactgaggctcagatataccaagggtcatatcaggtcataaatccacacccagtcttccaactccacattcccattttcctcaaattccagactgccacccatgagaagccgagtgaggtctccatcagtcgggctaacccagaaagggaaagtgcatggtgcagcctggaggtacctgcttgagatggtccacagtgagtgggaggtgctgcagggtctgcagaatctgctgcaggagaggaacgttgttggttgtctttgaatatgtcagccagttgttcagaagcttgtagccaccgacatcaataaacctgcaggcaggtgggatcagaatccgttaagcccttcctagttttagaactagcaagctcacatgtccagtgacccagaaaccccaagcctccccttccttccccatcactgcctcccacttacttgaccagcacgtctggggctcgggtctgcaggatgatgttcaagtacgtacatcgactcaccatctttcgtgcttctttcatcagactggaaagagaaggcaagttagatgtggggcagagcatctgctgtcagcaccgactgcccaggctagctgcccctcctgagtgctgggagaacaggcatgacaaacactatgccagctaacgtcatgcagcaggcagaggactctcatcttgggactgcggaatcaatctagagccacctggaagagcatccctcgtgtcccaacacacagaaacaactgcctccaggggagtcagggctctcacatttccccttgtaacctaagactggcttagctgtttgcttttctctggaaaccctgagatctctgaaggaaaaagacattttggataggcacaacatgacccaaaacagagccaagaattctgttataggctcccctgcttgcaatgcatcaggctttcagcccatgactcttaggactataaaccagatctccagctgctatcaccgttctcttgtcaaaatctacctgcgagtggtgcccccccctcccacatactcttctctcttactcatttctgctcagccaggacaggcagtcctctcttctagcgcggagcccagcgagggcggactcacctgaagatcttggcaatcccgtccacactcttcacctctccgtcccgagtgaggaagctgtccaagcccttgagaagttctttggggtctatgggacctgaacccatgatggtggtttctgaggtaaaaggaaaaaaaaaaacaaaaaacccacaagataaataatagcaaagacagtcccactaacttattcctctaatgagtcccactggcacctataagacacagtgactaattaatctatgtccaactgtactattccataggtcagtaaaatcaagtctgtgctcacaaaacagccttggtcacttaagtttggggttaatgcaggatggacctcaaaggcaactcgagtgaaggccccagcagcctacctttcctcagctaaaccctttccaggacaattacacatcaggagagtatctcagggctaagacccatggtaagatgctcaactcttcatgacggaagacagtcctgtctccagttagggttactaacttttgatgcggaggcagctgtagcttcctaaggtaaacaagccaaccctgagtaaacattttcaagaatcaatcattctctctccagaaatcaattcccttttatcttggctatttaagtcataatcacaagtggcaccatgtgtcagctgaagtggttgatgaaaaaaacaagcaagccctgagcagggcccttccccagggagctcagtagctctcagaaacaagagtaactgaaaaggaaagcaggcagactctcatcagctctgaataatgttgctcatcaaacaaacaccaaacaagcttttattgttccaaagttctagagaaagtttgcttgtggcttcagaagcaaagatgcaaacctgaccttctcctgccctcaaaactcaccactgtccaagactcccaaggaaaggccaacgccaagaaccaaaagacataatgaagttgaagatgtggaaagcggacaacactctaaatctggctaggaaaggaatgagttaaaagacacactgcttccatggaaagaaagccatttccaggccagaattccagagagattattaggactgatgtggttctgactgggagttttaggcacaactctatcaccaccagctcctcagaaccaaagacaggagcctcctcatcagcagtgaggtggccaagccagtatgggtaggaaaaaagcaaccccctcccaccccgctcctgcatctctcacaaacacaagggcgaataccagttttaacaaagtaatcattgcattttctacagaaagtaggactcttgcaatacaatagttgtttgttcccagacaaagcaggaaagaaagatgtgttaagaagcgggattgttttcctggctgagacatgcttacccagagtaaagaggctgtcaaagacaacagtggctctctagaaagaccaagataaaaattttgtgtctttaaaaaaagaaaaaaatcacttttaaatgtggacttcctaatatccaggacagcagcaatagcagcaggagagagggccagggaaaggaagggtggccgtggcctctgctctggaggctgaagactgctggctgaacacagagacacacagggaagaaatgccaagcattgagcaaaatttgttaactgcgatcacccaataccctgggacctgaggtcagaggagaaaaacattcaagaacattggaaatgtttacaagttaggggacaaactcaatgaggtgtggctatatgaacacagagagatctccctgtctgaagatagcagtgacttgtggaagcttccgctatagtaccatctgttagactggaaaaggaatgagtgggcccaaagtaatagtacataagcaatctagacttggaaatttaaaaatcctttatacatacacaagcctattagatctccaaatgacaacatatgcagtttgacaagtcttgaattaaacattacattccaggccctctgaacacagctgactgaaggtaacccagaggtaaacattatctcctttgtatgtctacctaggaactaataagcctaactgaaatgtcccttcattcaattgtcagacgagacagagggcagccacctttggagaaactggaccaatgagtaccaagctgagcgatgtctagtaccctccgatggaaatgggacctaggtattttaaaattgccatctgtataaacaaaaaggcacaatagtcaaggaagcatgtttccccttgtatttgggaggaggatggctgaacttgtctcctcatagtaaaatacgcattttctcagtgcctttcctctagtggtaattctttatttgggaccccaagtgccttataacctacgtctccactttcacagagagtgataaggtccttccagtggtaacaaaggaagaacccataatgattagagaagtctatggtgagggcccaaagctgcactggccagagtgggcagggacagtgcgtcccgagtgaggaagcttgtttttgttttgctttaaccagttgccagtctccttgaaggccacagacaaaagcctgtgaagtacctccaccttctaagcaccggggagtgatctacacttcttactagagatatcaaattcctacccaatgtcaaaatgaatttgacttgaggattatttggtttaaaatggtgggaaagcatccatcctggctcgtcactaaacatctaccactgctgaatcctccctccatcacttcaggaaataaggtccatgccagggcactttaaagtggacaaagaagtgccggctcctgttggctgggacctgagcacctcccaaagcaaaacgcttgctctccccttaagtgtcccaagagcttcctggtatgagcccatggtggaaggactgtctcaggtggttcagactctgtgcatttgcatggtaaggctctacttctccctcatccttattttgaaaatctggtaatcctggtcccaggaagactatttggctttcaataaagatacaaaatcatgtccaccatcctgaacctcaaagtcccccaaatagaactctggccacgtcatgagaatcaggctctccaaggttccctagaaagctttgcttttcatcttccatgcaaggaaggtcttctttactaatcccctgctcactagagatcaggaaccccagtgggtggaatgctcagctcccaaggtaggtatgctgcagaggcacctggcaaactgcttaaaagataaaaaagacgtgtggtaaacagacatgtggaagaggccctcccattcaatcagaagtccaagtaataatgagaatccacacccagcagaaaatgagctctgtcaaacccaagaccccataggacaggacaaaaggcttacaaactctgcctagaaactccagacttcaatgctgggcttttaaatacaaaaatgaaaagtataagaagaaactgtcaaagacttgactttgaaaaagttgggaaaaagagataagaaccagacacccaataccaccctcaagggtgtggctttcaacatgcatggattgccacagcactgaccaggtgggacaccaagaggacattcttcttctgaatgctttcaaggaatttctttttagaaggcaggaaaaagaaattcaaaaaggtggctctttggaaaaaagacaggttgtgaaatgtaataccagaaatgttttgcttaccagaaaccgtagcttgactccccctgcctcgagtttacaactgcagcctcctttcctaaagattcacttctcatcctagtgccaacatacaggaactaagcaactgcagaaggtgatggcactgagcacaagagtttattcccaaactgagaggtgagaataaggatgatttataagaaagtcctacaagtaccaacccttccccacatttgcgtcctgagcgcatggcacatttaagcttcgttaggcccaattgtctactcaagttacacaagccctgtgtcttgccccagtctcccaaacctaaagtacagttgggggttacttttccacacctgtcagctaaagcaggcaaggtacatgtcctagtttgtgatgaatgaaaggtgaaataaagcaatgaatgggctcattgttaaacataaactacaactacacgagaaggacagcctccattcctgtactcagtaagctttatccctggaagatacttcataaaagataaaggaaactaaaaacgttttctcccgagcagcaatctgcagagggatagaaagcatctgcttgggggtggagtttccagaggaagcaagctgattacatcatccttcaaagtggctcctcccccttgaccaagtttctaggacagccctaggctgactggcaaaagagaaaaacaaaggagagggacgccatcttgttatggcgaggacgactcagaaattaaaacgccatccagaccagccggtcgcttaactcacactacaaagcactaagttaaaaaaccagaggccatccctccacccccactcctcaatctgacctattttagttcagtttaagagcttactgaaaataaaatcaatatacaattttctgcgggttaagaatttgaatttgcaactgaagttcaatttgctactaccgccgaccaccccaagcctccctataaccggaaagggggaggacttgggacccctcaacaaatagggttgaggtgggaggacaggagaaaaatgggtcaagacacaacctgcaacgccgcttggaagacaaaaggacaaggaaaagtcgccatatttgaagcagggaagaaactcttttaacgacacaaatctcctagaaagctagcattcaattgcactaatggctttaaaaattatacttctgagttccacatttcccaacctttccaccctcttaactgtatccaccaaccactaaaaagtatcaagttaaaaatgttataatcacttttggctttaaataacctatgcaatctgaaacaatcacaagacattctttacctccccaaatgttatattgtatgtacttgttactaatattatattttgccctaaatttaagtgtcttgcaatctttattcctagattgccacctattttaaccatacaatatatcccaagcaaattacattaaaattgagaggatttaacaatcactttaaagacatagccagctaatacttctctctgcccatctccttaccctgcaatctttatgtacagattgcttattaatctggcaaattgaaaggcgctctgcttgtctcacacacaaagaagtgggacttctgggccacaagatccaccatcttttgtatgtgagctcattaacccttttgaagactgctaaccagaggaaggtaaccattcctccttataatagcaaaggcttatgctttggcagtctggatatttgctggattatcaagggttaaccgtcaatatcctcacttgctggccctcccttcaccctctccttgcctgctccacagcagggaagaggcaggtggcaggggagagaacaaaagactgcttagacccacaggacctttttaatggagattttagagacccgattggtccttctccagtattctacatttgttctatggtctcatttcttcctctcattatttttggtttcacaacgggaaacgttgatttcttgttgcaaggctggtttttgaaaattcgacacttactatccaatttttttgcgacgtcagcacctcgggctcagggggagggaggggtaaaattttggaggaaaaaaaaaataaaacaaccaaccaggacccaaactcaattacttggggggcctcattggatcaaaaaaaagtctcttgaaaaaaagtaaagaccaactcagtattcacattcccccccacccaactccttttagggagaggggggttcgttgggaagaaaaaaatttcctgagtggatatcaaaaaggaaatgctggatgagtgagattgggcgggtttgggcggggagggtggttgattatttttgaagttatgtggtgacgggtccttcggccacagattgcaagtcccaagcggagagcgtgggctggtggggtgagcaagacaggtgggaaggggtggaagacacagtggttgggctggtggccgctgctttcccctttcccccctctctcaggatcctttcaagggcttaggtgttgctgaggctcgtttgttttcctgatggccggcctgtctttctccaagaaaattcaacctgggatgaaaagaacacagaaggagaaagatgtaatcagtacggggtcgccttaaaaacaaacacacagctccccagcgcccccgcgggccgtccgggcacacggccgcggcgggcccatcgtggctcccggaggnnnnnnnnnnnnnnnnnnnnnnnnnnnnnnnnnnnnnnnnnnnnnnnnnnnnnnnnnnnnnnnnnnnnnnnnnnnnnnnnnnnnnnnnnnnnnnnnnnnnnnnnnnnnnnnnnnnnnnnnnnnnnnnnnntgggcggccccccccccgcccccggggggagccccgccccccgctccctctcttccggccccttccgcgcccttttgcgcaggcgcgtgaccttcgcgtctgggcacctccctgtcccgcggcctccaccacttccgccccggcccacgcgcctcaccccgggggttggccgggacggctcggcgcatgcgcactggcgtcagcccgctctcaatcgcgcccgaaacggctttcgcgtcacgcgctccgcccgggatctgcgagtcatcgcgacccgtccgggagagacgcgatttgggaggcccgttcgattgtgacgcagctgaaattcgcgtccctcgcccggccccgcccggggacgctgccgtcctgacgcacgtgagcgcccgccttccgcctggcgagcctggcccctggccccgccctagccccgtgtcccgagcatgcgcagcggctcttttgcgcttccggccggcgctacgtaggggcgtgcgtcaagatggctgcctcctgggctcacacgctgctgaggctgctgccctgcctctggcgaagttccccgggagcccagggaaccgcccgggaaagattggcgccgccgcggggcgtccagggtttgcggctttagtcctgtaccgccccccgtcctccaatgttcagccgtgggggaaaaaccagggtcgcctcccggcgtcgtcttccccgagcacctctaggctaagactgggcaggttggactaacccctggacacgcgcagctaattcttaatccttagccgagtggttggtgtctgcggcggggcccaccaggactgcccttcaatcgaaaggccctaagtttaattgtttttcttttacctccgctgtgctgtgctggagacagcctcgcccagccccggggtgagctcttaggtggtgaccttgaactcctggcccttctgcccaccccacccccacacaccctcccacttcattgggattacaggcgttatcctccacgccctgctccacccctaacacatcagtttctcttcggagcatgctcgggcgtatgatggtgctccctgggttgaagtaactaaccctcaagcctgaggtactcaccaccctggaggctcttggcagggcagggagaaatagcttcaaggcttgtccccggcgacactccctcaagtgggactgaagggtggcgacggaggtcacacaacccaagtaatgacagggttggtagctgtaaagccggcgttggcactcaagttttgttttgccctgtggaatgttgacctgcagcattttagaaaactggtcaactcggggacttggcattttcctcccatgtctggtgcgtctcctgctccccataagttttattcccgaatgttatacatattttctctcttccaccggatccaaataatgcatgtcaagcacagatctttgtttgccaagttttttaaatcgttacgtacactggttggccaatcctataaggatctgattggagctagtggttgttaagtttaacacatgatactttaatgtctaactgctgagttgttcttatattttggatgcacgttccacctgtctccccaaagtataataaaccaaataattgcatcgtcttcttgaaactcattctctcatgttattactccctttttaggttcccctccgggctctttgcaccaaaggccctgaagaaggttccctgtcctccctccccatttctccctatgagaatgaaccttggaaatatctggattcagaaggtacccagattggaggcaagggcgggggcagaaggaggtgaccagagacatccctaccacctccatgcgtgaataagctcatctgttttgtgttattgttgtttctatgttttgttttgttttttcaagacagggtttctctgtgtagcttttggagcctatcctggcacttgttctggagaccaggctggcctcgaactcacagagatctgcctgcctctgcctcccgagtgctgggattaaagaggtgcgccacagacaccaggcagctcgtctggtttttatttcagaataccagaaccgctatggctctcgccctgtttgggctgactaccgccgcaaccacaaaggtggtataccaccgcagcggacccggaagacgtgtattgtaagtgtttaagtttgtcaccttggtgggatgtggctagggaggcacagggagcataacgtaggttctttctgtgattgttgttttgtatctttaactaccagttttttgtctacagcgtaaaaataaagtggctgggaacccttgccccatctgccgggatcacaagttgcatgttgactttagggtaagcagaatcttttatccagaactagggtttggatcctctctgcagtgctgaacagatcatcgggtgtatcacacactttcgtagccccaaacccgaacattccagtgacagccaatgtgagaacatccctctttccaggctttcaccctctactgtggattttattgcaagggtttagttctttctcttaaaactcaaagtcttaaattccaagagctggaccagggtaggcttttaatgccaggacttaggaggcagaggcaggtagatttgggaacattctgggctacattaagagacttgttttgcatgactctgtaatccaacactagcaaggctgaagaagcagaagtgtgagttccaagtttcgggccctgtcataatctactgcaccgttacagaagtgaaggggaagaaagctcacttctcctgggaaatgatgcccagaagttaagcagggtggtaggatgagacagagtctaagtatcccaggtggtcttggacttggtatgtggctaaacctctgatcctcctgttgtctaaggagggggagttacaggcatgtaatgatgccacacctagctcagaggttttattgttttgtttttgtttgggatttttgttgttgcttttagcaaaagatctcctgaaggaaaaacttccaatgacagagggaatctatctcttctttttttgtttgtttttgtttttcaagacagtttctctttgtagtcttggatgtcctggaactcactctgtaaaccaggctggctttgaactccagagatccacctgcctctgcctcccaggtgctaagattaaaggcatgcaccacccggctcattatcttttgaaagagggtctgtttatatagcccaagctgacctcaattcactgtcctgtctcagcaggcggagttctaggatttctaccttgttatttccttgtcctcccatacctggggctagagggcagatatgaagggagctgtagaatggaatagagttttttttcttcaaaaagccttcagaatggtaaggcttcgtcttagtaaatagtgtaaacaataaagatgctcacaggaaccaaaacaatggctgcacgtggaggatgctgggactccgagtgtcagtctgttggtggggggttcatgtccttccagcacatcacggaggatgcctgcccagtctctgcatgtaggcggttacaaaaagaaagcaatgactgggctgagcatggcggtaggtgcatctactttcttccccactcacctcctgtgagtggtttgtctgcttgtcttatgtaattaggactattaaattgctcttagttacacactgtattttatgcattatactcagcaggctattgtattacttactcatccatcatgttgtcatttatgggtaatttctaggaccttgatggctgtcccaaagggggccattttggaacatgcctcttggtaacttggtggcagactgtagcatgtatatgtgaaatgagttggtgaggctagaactgaaggaagcatccagatagacactgagcagtaaagacagccacgaggctgcccttgaactcactgatccacttttcctctgcctcctaagtgctgggattacacctgataaaatgtagcccaggctgccctcaaattcatgcttctgccttttcatggtgttccaccggggtgtgccaccacaacgggctatgtggctgtgtaaggtgtcaactcagctgtcagaggtcttgaccacctcctcagacattgtctatctctttcctgcagaatgtgaaactcttggaacagtttgtttgcgcccacacgggtatcatcttccacgccccctacacaggtaagcttatactgctatagttttttcttggaccactcctggtttatggtattggttggtagatgtttgtttgatagatcctatatatagcacataaatgtggttgaagcttttggagattgtatttaatgagggtactcattaggttaaaacagttaacatgtatacaaaagactaaggtgagcctctcaggagtcactgctggaggtagagccagggtgatcgtggtgagtttgaggtcagcctggtctatatagttccaagacagccagagctacacagagcgagcctgcctttaaaaacaaaaagaacataaaaagaacaagaaaaacaactaagttaacaattcgggcctgactctaccttaccctctggcctatggccatgtccagtttttcaacgtggcctctacagtagccaagccaagtatcataaatcatagacagagaaggaaagacctatagagcaagaataatgaactcgctgtccatgagaggtgcatggccccgtaataagttccttttgggaggaagttttttttgctatcaatctccagaatggagatgggataattactgctacttgtatcccattccctaacttgaaatcacttcttcccttatgggatctttctcggtggattgtccaagtcagcctttagtcacacttggcaactggcccatctgaggttttatcactccctggcatctctatggtggccagtcacccgaggtcctcatctagcttttaggcaggtgggagactggctgcacgggaggggggtggttgttaggtaaagccagctcctccacaatcagctgtctctgtacagaaacgttagccaattctgctctgtaggatgtgagttaatttttctctctgtaggagtctgtatgaagcagcacaagaagctgacccaggccatccagaaagccagggagtatggtaagtgacagcaaggtgacttggactggaaggaaggtggccagtgctcatagagtttcttgtaaattgggtgtggtgctggagcctgtagtccagttgcagattgctgggtgctagggctacgtgttaagacgctgtttcagtcacgaaggaagaaatgtttcttttctcacttgactctgtgtctccagagtcttgagtcttgtgttctttgttccgcccctctgtagtcttctgacagatgagagaaggggtaccttctccgtatatagtgactgaacacacagctttgcggggagagtccaggcagtaccctatgttctttgtttcctaggctggttgtacctaatgtttttaaattgggggggggggttccttttggtttttcgagacaaggtttttctgtggctttgggggctgtcccggaactagctcttgtagaccaggctggtctcaagctcacagagatcctcctgcctctgcactccagagtgcagggattaaaggcgtgggccgccgcctggctgtgcctgctgctgttgattggtccctctgtctatagtgccttcttgtctctgaatggaactgcccttcctcatcctccgttatttcctctaatcccataggtctcctcaggtactacgttccccagttcgagccccgagacactgacctcagtactgcccatggagctgtcagtgtcactccgccggcccccacgttgttgtcaggagaaccttggtacccatggtacagctggcagcaaccaccagagagagaactgtcccgccttcgccggctctatcaaggaaatctcctagaagaaagcggccccccacccgagtcgatgatgcccgagatgcccaccgctccaccagcagaaaccgccactgagcagatgggctcccagagtgcttaggacctgtgaactggggaagcagtcaggggttaagggaatggagtctaaggttctgaaacgggcctgttttggggacagtggcaggcagcccctaagggaatgactgaccgctgaggaggacggacatgaggttggggagaggtctggaggcacatgggaaactgaccgtggagaggggttcagatgtgaccgggagacttgactgtggtgtgtgcactggatccctgtcgcccagctttcctacaataaagccgtgtccgtccgcgtgtccctggcgtccttcggagtgactttccagaaggagggggtgaggtgtgtgagattggtgctgtggggagggtgctgagtctaactcaccctcctgccactccagcagggcaagggtgtgtgggggcgattccgtcctgtgggtcccctgggcgctgaaaaatgctgggttgccgtggcaccgcctaagcgttgctatgggaccgaaaagaacggggtctcccgctgcggaccctgccgtaggggcggggcgatggggccctttgcgcgcccctggtggcggaagtgacgtcgtgtggggcgtgtccggtcccgcacaatgggccatggagttcccgttcgatgtggacgcgctgttcccggagcggatcaccgtgctggaccagcacctgcggcctccggcccgccgacccggaaccacaacgccggcccggtgacatttcaaacccgccccgtggccctcctgtcccgtttcctcgccaagcccggccagggcaccacgcccccttctcgctggctgccggcccttctctctgcggctcacagcccggtgtctagtgacctctgaccctgggtctagccgggttaacgggcctgcatctccctgacctttcgccccctggcccaatgtgtgcggttgaccccccactgccccacaagtcacctcatgggagctgtgaaacccaagtttgggatctggaggggtgaggtggggggtgaggaagagatccgagcagaggcagaggagacccctggaggggcctgggtgggagtcgagcaggctgccaggacagacccctgggatgctgcgacccaggcgaggttctgacggcccgtctctctgcagcgtggacctgcagcagcaaatcatgaccattctagatgaactgggcaaggcctctgccaaggtacgggcacctccaggggaggaaaggctagccggggtggcaggtgggggcctgtacgaagcctgccctcatctccgcaggcccagcatctccccgcgcccatcaccagcgcttccaggatgcagagtaaccgccacgttgtttacatactgaaggacactgcagcccggccgtgagttctatgactgtcatccatgcgaatcacgccgttatccttagctgtcctccttccctttactatctctcccagacagttgctactgcctggctcattctttcccccatcccacagggcagggaaaggagccattattggtttcctcaaagtcggatacaagaagctctttgtactggtgagtgttgctgcaaactgggcattcgtaggcttcggtgccagagaagagatgtggaggaggataggggtgggtgggcagcaaagttgcctggctcctaaaaagatgtgttgttgttgacgtcacaggacgaccgtgaagcccacaacgaggtagaaccactgtgcatcctggacttttatatccacgagtcaatgcagcggcatggccacgggagagaactcttccagtatatgttacaggtgccagccggtcttcgagggttagccaaaagagatctaaaaggctcctcccctgaggctgccagagaccccgctgcctgcggcacggtggtcgttttcctcacatcccctcaccgggttcccaacttcatgctagcatgcttctctcactgccccctgcccacaagcctcccctttccctgcagaaagagcgagttgagccacaccaactggccattgatcgaccgtcaccaaagctgctgaagttcctcaacaagcactacaacctggagacgacagtcccacaggtgagaggctctgcacagaggctgcaccttatggcactaagcaatcctgtcagagtggctgacccttttgtgaatggtgggatacaagctagggccttgggcatgctagagctgtgctcggccactgaattacatactatgtatacagtcttctgcctgcatgcagatctcattcaaggcggttgtgagccaccatgtggttgctgggaagtgaactcaggacctccggaagaacagtcagtgctcttaaccgctgagccatctctccagcccgacatttatattcttactgtgcattccagttcatgtgtggagatgaaagacatgagaatcacttactcagggtcagcaagtgcctttacccctgaggcacgtggctggtcctaccttgagttgtttgttattgtcttagacttatttcattttatgtgcatgaatgttttccacatgtatatatgtgaccgtgttcatgcctgtaggcacagaggtcagaagaggtgccagaaccatgggcctggagttaagatggccgtgtgctggggactgggtcactctggctgtcctagcactcaccttgtacaccaggctggcctggaacatcgatagccacttgcttcacctttagagtgctgggattaaagggctgtccccaccacctcagctaatttattttttgagaacttcgtacataagttctgtatctacaaccctgctgcccctccaactcctcccatgcccccctccaaattatctctcctttgttattgttccatgtacatagatgtatatatttaaatctactgagtccctttagctttgcttatatctacatgtgtccaggatgtcacctctttttttgaaacagggtctcactggccttgaactcatggtgattctcctgtctccacctcctcgattatgggatgacaggtataccttgatgcccagctgtttggtttttgaaagagacttgctgtatagtgctccccctccccgcccacagccctgcccacctcaaactgatgatcctcctgcctcggcctcccaagacttaggattatgtcacaatgtccagtgtggtttatttttacagctaaatctttttcttcttacactatcacatgtactacaaatactcatcctgtcttttagttttgttttggtttttcgaggcagggtttctctgtggctttggaggctgtcgtggaactagctctgtagaccaggctggccttgaactcacagagatccgcctgcctctgctccaaagttctgggattaaaggtgtgcgccaccatgctcagctttcttgtttttgagagagtatcattgtctagtgttggctgacctagagctcacagaaatccacctacctctgcctccaccagagtcattcttggggcatttttgcttgtctgttttcagacaagatctcattctgtaactcagctgacctgagactcccagggtagcccaggattcacagtcattctcctgctccagactcctaactgctgtgttaccatgcccgcctttcatttgtattctttgtttaaacattatccattctctgtttatgtctatgtgtatgtgagtgccccggcatgagaaaataaattgagtgaccattgaggccagaggtattgactacttcacctggatgctctccaatagtagtaaggaatcttaacctctgagccacttcctattctgtttactttatcaggacttcttccttccttcctcccttcctgttgttggtttttttgagacagggtctctctgtgtagctttgactgtcctggagctatctatagaaatcaggctggctttgaaccataaagatcatcccacctctgcctcagcttgacaagggttgtttactgtactttattttcatccccaaacataagcagctcttttctacctgttctcacacagggggtttctcatttagtcaacagaataacagacaccccagccctcagggagcttggtttatcacggaggtgactctgagtttagagacacatgactagtgcatcaacagacatttactgtgtgtttgacactgtcttgggcactgggaccacttaaccaaccaaagaatctgccttctaaatgtggaaccagacaaacataaggtatcctaaggccaagcaaggtggtgcataagtgttctttactgtagttaagggtaagtgttgtgagaaagtgtgggtgtcggtgggggaggggctttacaggtgccaatgagacatcagaggaagccaattagttcatttgtgcagcatcgtgaagagagggtgtaatggccggtacagaggccgtgctcagtgtgaccaaaggaatgcagtagatgaaagccaaagccaaaggaagcgagcacacttatggccacacaggtcattgtaaataaaggctttggtttttacatagtgaaaagcaacaccacagccaggtggaggcgcacgcctttaatcccagcactcaggaggcagaggcaggtgtatctctgagttggaggccagcctggtctacagagtgagttccaggacagcctccaaagccacagagaaaccctgttttgaaaaaaagcacaatcactttggcggtaggtcttgtctccttggatttgcctgctgggccaaagaaacaggcagtagaagacccagggctgaggtcagggagttggatgggaaagcggagtccctgatgagagagagccagggctccactagggggcagcagtggatggggtggtgtgtctaaaacaagtgtgatctcgttacagatgggatgtgggaaaataaccattaaacccaaagcagtgggaggcatgacgctgcatgaaataataggtagattggctttggggaaatattaggagtcttctcttgaccggcttggtgctcactgtctggctctgaactcacagcaatcctgcctcagcctcctgaaggctaagattacaggtatgagtcaccatgcccagtgtaggagttgatttttaaggtggatgggagttgaaggtcatcactagtttggggtcatcctaggctacctgaaactcttgagtcaaaaaaaaaaaaaaaaaaaaaaggtaaaaggacagtatcagggtgtggtggtccacacctttaatctcagcactgctggagctgaggtaggtaggtaggtgtctgtaggttcaagatcagcctggtctacaaaatgaattccaggcctgagggggatgcagagtaagatcatctcaaataaaataaaatgaaataaaataaaagagcagtgcaaagggcacaaccttcacatcagaagcatcacacagtttgcaaggacaagtggagcagctagcttttaaggaataccagcagatgtcctgtaaaataattagtattagcaggtgtcctgtgatttctctgttcaagacttatatgcatgtgtgagtacccgcatgtatgtttgtgcgccacgtgcattcagtgtctgcagaggtgggaatagggcgctggagcccctggaatatagatggttgtgagccgcactgtggatgctgggcatgaaaggtacccagacgggcagtatctgcccagcctcttgatttgctctgcatctgtgctatgatagctctgcttctggagatccatttgtctaagcactgtttggtttggtttttcaagacaggttgctctgtggagccctagctatcctagaacttgctctgtagaccaggcaaactcacagagatcctcctgcttctgcctcctgagtgctgggattaaagctatgtgacaccactgcctacacagagttattattttacgagtatgaatattttgcctgcccaaatatatgtgcagtatgggtgtgcctagtacccatggtggaggtcagaaagggtgtaggatcccctgggactggagttagagatggttgtgagccacccttcgggtgctaggaaatcagtcttccccaagagctgcaagggctctgggctcttctttttctacctaacctctattactgtgactctcttctctccccttttcttctctttctcgtctcacgtagcccaggttggcctccagctctctgtagctaaagataacctttcccttcccgagtgcttgcatgacaggcatgtggcactgtgcgtacccagtgtatgtggggctggggctttgctcagggctttgtgggctggcaggtaagcactccactagctgagctgcaccaaagcccacccctgtggccttgctggcacggttcctgtgcccactgtgtgctgagattgaggggacgacacgccttgttttgctttatcttccaggtgaacaactttgtgatctttgaaggcttcttcgcccatcagcatcgtaagttcctgagcctctcgtagatctagtagctggggaaagggaaaggaaagaggtgggctcctggtcccactggcccccactgagggccaccgcctcttcctccctcacagggccccccactccctctctgagggcatctcgacactctcgtgccgctgaggtcgaccccacacctggtaaagcctgcatggactgggtggagttaaaggacagtgaggtctagtttctcaaggggtcccaaagtgagcagtgctgtctgctgggcactctggatactctaaagccacccacagagccagcagtcagttccctctgtttgccttggccctgctgggagctggtgcattttataactgctaatgctgaagtgtgcctctaaccacactgctccactgcctgcggagatgcaccctgcccctgttctcagcagaggttctcattaagcaagccccttcagagctttgctgatcactgatgtcaacatagcctctttactaggtcagctcgctctaaataggccaaaatcaaataaatcacttcataaactccataggctctgtcagccagggaggcacaggcaagtgagcccagcagtcctttgatttctgttcatggtgtagtgatgtgaccagtccacagtttaaatatttgctttagaagagactgctccactcaggagtcagaggcaggcgatctctgtgagttcgagaccaccctggtctacaagagctagttccaggacagcctccaaaaccacagagaaaccctgacttgaaaaaccagaagagagagagagagagagagagagagagagagagagagagagcgagctcaaaattgatggaattttaacatggcatggagacacacgccttttcccagcattcagggagccaaagcaggtagagctatgtgagtttgaagctggcctagtctatgtggtaagctctaggccagccagagcaacatatgagatcttgccttaaaagaaaaacccttttcaaaaataattaaacctggctgggtatggtggcgcacgtctttaatcgcagcactcaggagacagaagcaggtggatctgtttgagtttgaggccagccgggctacacagagacaccctgtctcaaaacaaaaacaaaaccaaaaaaaccaaaataaataaatagacccatttggagtaaagctcacaagctgcctcccctgctccctccccctggacatcctcagggagagggtacagccttcatcagtggtgtggtgctgctggcacggaatggccttcttcctaggatagccctttggcctagaaaaggagtaacagtggcccaaagaacagcttattgctctctattagtgtcagcccaggctcccagaggcccatcatgtccatgaggcgctgtggttcctgaggccaccgtccagcaggcagtgaggtcacactaccatcagggaggatgcagatccacagagggctgctgggatctccacccttttgatgtagaacctgacccacccttgccatacagtaattcccacctgctgaagcccctctgcaaacatttttttctcttctttttggggagggaggggttaaggcaggatctgtgtagttgtgactgtcttggaactaactatacagacaagggtggccttgaactcacaaagatcagccggcctctgcctcttgagtgctgggattaaaggggtgagccgctgccaccattcggctgactccttgttctttgtagctctggctgtcctggaacacaccatgtctgtcaggcctgcctctgcctttccagtgcagggacatgcctttagtgtgtgtcaacacattcttttattattactttaaaacctagtaaggcctcagtctctccatatcttttttgaacaggcaggagaggttctgcacctcctctcccctccccagaacaattcccaattaaccaagggctttgtccatctcatctagagggacccagggtcctcactggcccagctgggactattccactgccccagaaccccaggggggcctgacaacacccatggacagtaagagctcgccttcctttggccatcctttcctgtatttcccaggccctggtctcccctggatctttctcctgaaactcttgtgtttggcctactccttctggctctcccggaaagtgctccagcattcttcccccaaactccctttggtgtgctggctttggcacagctcagcttctgtactggcattcccaggaggagctgtggtgtcagggagcagaagtttggcattgtggggaagtagcagggaggttgggtggaaagtgcatctcctaaaactgaacttgtgtccctactaccaccagctccagcacggaagctgccaccaaaaagggcagagggagacattaagccatactcctccagtgacagagaatgtaagggggttggggaggggggctggggggcggctttgtgacatatcgatttctcaccaattgaccctaatctttgctcttcgctctgtggaaggcaccatctcttaagtgcatttaactacctgacccaataactccagcttctaggtccttaatctttgtcttcttgcttgcaaattataattaataatcttattaatggaggaaataattctctccaaaaaagcagatctgcttagtagaaactccagacagaagggatttctttctgattaacaggtggatgacaaggggagggtggctgggtctgaggactcagaagagggtggccatgcctggatggagaaccagatcaggggaggctggctagacttaaggacccagagaggagtggctaagggaaggtaactaggagacaataataaatggctaaagctgctttttctacctaacctctattactgtgactctcttctctccccttttcttctctttctcaccctctttgtcctcctccctcaagtcctgaaggtggctgtggagcctccttggcctctgaacagggcccctcgccgcgccatgcctgcagcccacccacctccacgctccagcagcctggggaactcgccggatcggggtcccctccggccctttgtgccagagcaggagttgcttcgctccctgcgtctctgcccgccacaccctactgcccgccttctgctggcctctgaccctgggggcagcccagcccagcgcagacgcaccaggtaatagggcccgcaagtctgggagcctcgggatgtctagaagttaggaaggtgaaggatgaggtgaatcccccagaaatgtgaaacaataaacttctgtagcactggtctggaaaaagagggaagtatctagaggttttatatggagccagggaccagagttgtgttctgagggtcatcaaaagagtaggaagactggatccatcgggtgggggccttgagcctttcacaactgggggattcttggttttagcatttgccagggatatgcatgtgtctcacaggctgggaacaagtgggttgctctggcaagggcctgtgtgccaagagcccgtccagagaggcagggagtgggtgtgtccttatgtctcctcttagcttcttcttcacctctgacatctccgtttttctctctccctgcctcccctctcccatcctcctgtccataacatccccccacagctcccttccccgctctgatgagagtcgatactgacagcctcctcccctcccccttcctaaaacctgcaacccactcttccatcgagattttttctccccctttcttgaacagctgggttgccagggttctaaatagcctaacgtttgtagcttttcttaaccacagaagacaccccacactcccaacatgtgttccaagtactctccatagacagcccattctgttcccagaacgctcgggctaaatggctcctactgactcccctagagaggcactctgcttgtggtcagactccagaccatcagagcaagtccaagagcatcctctgccagggagagtgtcctgtcgatggataattccctccacagtgcccacttgcagctcggatcctgccgccacacaaacctgtcatcagtctgctgatgccagactgtgagcaagctgtgcctcagagcagcagtccaggctgacaagacaaggactccttggcttcccagcagggtcctcccaacattgccaaactcttactttccaagcgacaggtagatagatgtgtcaaatgttgctctggggtctctacaggagttctacagacaccaccactttcctcagctaacccaagtctttctcttggcggcagaccccagcaaaggtcccagggctgcttgcttagcggtgtccctgaagataagcctggttcactctaacctccctgcctccctaggaatagacttttgaggttgtgttgaaatgacatgaggatcaccctcctgctgccctccctccttctccatagcaggaaccccctcccctgcttccatgccttccggggtgtagacagaacctcccccccccactctgaacatgtgatggtagatcaggtgccccactctgtgttccctcaagtccttgggagcaggacctccctctccccacttaatccttccttctgcccttcagtgctgtctcaataaagtgtggactcttctgttttctaaattgacattttcaacgaaaaccagcccaaggtgcccagtgtcttttgtgcttctctcagggctcagtgcctcctctctcctctgcagatctgaggtctgcagagctcatcctcgcctcccccccatgcccctccttttgaggatctgcccttccccctctattgctggttctatcctagagttgcagtagctctgtgtagacctctctatgcctgtgggaaccttagcccacaccacccacccccacccccggtgatatctacctctttcccctggccagcccttgataaattgttaagattggctggatcttgggactcactaacctcagggctgtttctggattcctttcctactctttgaattcctcatgtctgcccttagtgctctctcaagacaagtcctacctactatctgaccccatagcgtactgggcatggtggcacacacctttaaccccagctcctgagaggcagaggcaggcagatctccattagagtgtgaggccagcctggtctatgtagcaagttatatagtccacccaaggctacatagtagaaccctgtctcagtaataatagtaagtaatattaataatagtacaacagtctgtcaccctcgaaaagacagccttttcctcctaaatttgaccttgctactctggtctgagatttcttatatttaaggtaaccagtttttcaaacatcagggcacatggtcccacaagctcctttttgtttttgtgtgcccccccccatgcatgagtgtttttatgacataatcggatcatatcacataccacacaaccccgggaaagtaacacagcagggatatgtcagatcttgacgcacaaaataagacctcccctacctttgctgggaaaaaggctcagacaggaaccctctgggtggcagctgcccttcgccttgtccccatgctattatccttccctcgtctctctgacccctccctgccatctgtcatcctgaaccacttccccaccatctcccgtttcttctacaggggggctccccgggggctggtagcccaaagctgccactacagccgccacgggggactcagtacctcatccctgggtagaggtaagtggtcagcctttcttactctccaaccaagtgggccacgcacaccccgccacggtctcccagatgcctggtatttccgcaggcaatcaagaacggaagcagggggagcaggaagcagaggataggtgaggtccacacctccccctaacagctgctgcccgcggcgcctctgactctgcctaaccctgctctcccccgctttctgtgacctgggtacctttctacctcacagcgcataagccttgctcttccttgtgggttgagctctggtgcttgcgtttggacacagtgtgaactgccccagccttctaacccagcaggtgttgtccaccacgttcaggcttgacacccgcgacctctaacagtgactaccagtgactaccgttagctctaacaccctccctctccctctccctctccctgccaccaggtcgtccagtgaggatcagaccttgttacaggatgggtctggggaggaacctgcgcactcagttgctccaagggtccaggttccggcagctgtgggtggggacgtaatgaacgccaggttcattcggaacctgcaggagcgccgcaacaccaggccctggtgatcgcagcccctcccttcacaactggacacagccaaagccgggcacttcataatggatgcattcattcattcattcattcattcattcagcagacctgaccgcttcagatcgtttgtatcgtatttttaaccagagcaataaaagtatttattttttaatcactatagccgcggaacaaagtggcccgtcattccctcggtccacccaccccgcgtcctcacgaccgctttccagctcgctctaccttcgcccggtccgggtttcgctaggccggccgagggctcagagcaagtccaagagcatcctctgccagggagagtgtcctgtcgatggataattccctccacagtgcccacttgcagctcggatcctgccgccacacaaacctgtcatcagtctgctgatgccagactgtgagcaagctgtgcctcagagcagcagtccaggctctggcaggcaccaaggtacccccgcccctggggctccttggcagcccagggacttggactcggtcctgacccaggatggcctagcgtcctggcagcgacagcggttagtgaccggaggagtgcacgctccggcagtcagcaaggattatgtcatccagcggggccccaaatgataacagtttgcgtttccgtactacgtacgcaatggatggtgaggtttagagcacatacacgatcctgtacagccctcataataagtctctcaaggtctcaccgtcctccacgcacaggaagggtgtcggtgggggaggggctttacaggtgccaatgagacatcagaggaagccaattagttcatttgtgcagcatcgtgaagagagggtgtaatggccggtacagaggccgtgctcagtgtgaccaaaggcagtaaaccggctcttcattcgttcaaacaatgtatttttaaagtttgtttgttttatgtgcattggtgttttgccgttggtgtcaggtcccctggaactggagttacagacagttatgagttgctgtgagggtgctgggaattgaaccccggtcctctggaagagcaatcagtgctcttaactgccgagccatcgctgtagcccccataaaatacatgcttagaattcttggtctcagagatgcaaaactggctcccaatagtgaggggattgattgtccttttcctagagttggggagggtggcactggcactgttgtgctctatggtcctgtcttcatcagagacagaaggagcccattcctcttccctctggcagttttcccttctagaagccagaggagcaggtggggtttgcagcttgctaacagcccagcttggatgagactttaccgtgtctttttttgtttttgaaactaggtgtcactgtgtagtcctggctggcctggaactcccgggccgtcctgtgtctctctccctaagtcaccattcctggcttagacatctgattttgtttttggtttctgttctctttctctaggaccagctttctcctcgggctctaccattcccacccctctgttcccactccactccagcttctccaccttttcctcttccctggtcactcacacccccacatcctgccacccaccctcttcctcaggctctaccaccacctctgtttcaggtccaggctgtcaactcattgtgggtggttctccctctgggaaagggggaggagggaccgggacctgagttgcacaatggctgtctggatgggcttaggagcctttttgagggacccccttgcccccatcctggggcttggatacctttccaagctcctggatctcctcgaccttcccccgataccccatcaagagatcagagcatggaggaacacctggcggtcatgcatgagaaactaagacaagaggtaagcggctcatcggtaacgggaaccgctatggagacaagtcagtcagctgaattcctggcaacacaaggcagtcatatataactgtgccgtgaaatatcttctggggaaatggctggccctctgtttgagtggaggacagctaagttggagttgacctttttgggtgggagtgggtgttagtcgaccctaacaatagataactgagaaatacgtaaactggtgaaaggcctgtaatacagtcagtcaggaggttgagggaagaggactccgaggtcaagccagattgggcaacacaccttgcctcaaaattaaattttatatatatatatatattgaaatgggacctgttctctcccgctgagttgatcccgtcttcttctccccagttgcctaccctctttcttcgctcccatgactacactctgtactcaatggatgtggagttcatcaatgagatcctgagcattcgtaccaagtgagagttggggcaagggcgggagaagaggatccaatgctaaacaccccagccttgtctcagagaagccttgtcaaagagccttgtctcactctctaactaggcggcttgagagtgactcttccccactccttggacagaagccagattgggtttctagttcagcgatcctgatacccctgtccctttgattctcacaggggccggacatggtacgttatgtccctgaccctttgccgcttcctggtttggaactattttgcacagtttcggctggagattctacagctgacccgccaccctgagaactggaccctgcaagcccgctggcgtctagtaggcctgcccatacacatgttcttcatgcgtttctacaggcgtgataaagaggatctttaccggtaagagggccccgaaccgcagtggcttcactaatactgtcttggaagttggtgatcttgtcttgatttggctgtggatttcctgagggtagaaactttattttatcttttgttgttgttgttgttgttgttgttgtttgagacaggatttctcagtggctttggaggctgtcctggaactaagtcttgtagatcaggctggtctcgaactcacagagatctgcctggctctgccacccgagtgctgggactaaaggcgtgcaccaccaccaccggttttttgttttgtattgttttgtttttttatttaaaacgaactatttttgtgtttatgtgtatgtggtaagtgaaggttcagaagacagtttgtgagaatcggttctctcgttctaccatgtaggtcctgggacttgaactcaggtccttgcctgcaagcacctgtacttcctcaaccatctcaatggcccagtctacttttaataaaattaacagatttttgtgtctactaagaaaccccagccaggtggtggtgacggcacatgcctttaaccccagcacttgggaggtagagacaagcagatctctgtgagtttgaggccagcttggtctccagagcgagttccaggacagccagccagagttacacagagaaactctgcctctgaagaataaaaagaaacccctgaatttcagtttcttcctatgctacttggacctcacaaggtatttggataagtacttgtttattgaacaaagtattcctgcttcctggaggatcaggagtcaaagccttaactgtatgaaaccatctcaaaaaccaaacaaacaaaactactgcatcctaaatttagtttcacagcccttggtgaagtgcatggttaagtttctagctggtacatcaccccaaattactaggctcagcctctaccattgtacttaagcttttaaatgagtgattctgggccggtgagaagatgcggtcggtgtgtaagagaaggcgcttgcctccaagcctgacaacctcggctcagtacccggtacccaactaatgggaggaggagagatcgtcttctgcctggggcgcgtgcacttaccccacacagtcaaacaactcgtgtttcaccagctttgctgcacagtaggataacctaaggtcttctatagcgtggtactcggatctaattgctctgaatccaacctgagcgtgaagttttaagttcatagatgcttgggcacagtggagagtgactgtgatagtcccagtgttcaagccgagagctggaagtcagtctgggctacatttctgagggcctgtcttcagaacagttcaccaggtgaatctgacacgtggcaaactttaggaactggttttaacaaatacttgaattacaccttagcttctcccttctccaggacctttgatgcctattccaccttctacctgaattccagtggcctcatttgtcgccatcacctagacaaggtgagtgtcgggactgggtggggtagggtgaagggcagagcatgtctgtgttcctccccagcctccattaacctgtctctgcagctgacaccctcacactcgccgtcaacgcctgtcaaaaagctgctagtgggagccctggtggccctggggctgtcagaaccagagcccaacttacacacgtgttccaaggcctgacccagacttgggtcaaggcatcactgaagactttgctacgcacaagaggaggtgaaggtggacaagaatgtcgagggccagccacctccctccatgctctctctttcccatctcatgctgtgtaaagctgctgtgtaatttaatttgtaaataataaagtttaagcaacgatgaggtagagtttcatgtcactttttcagggcctcaaagttgccacacacttaattccaaaaataattttatttactaaatattaaataaagtatggaaggaaaaggaagctgtgtggtccagtccgtttgtcatccactagcccagctcttctcgtgtcttgcctacttttttgggcattttcttagcatggggatcttctagttccttggccttatagtagtggggggccacttccaagagccagctgctctcaatctccaggacctgtaagaggacagaggtcagtagggctccttcacttccaagccagggttttcactgtgtggttaggaaaggcttcccttcccctttgagggcaagaaggcacctggctatgtttcatgctggccgggcagacacaccctgacctgctcaagacatcaggtaggtgagccccgagaagagcctgttctgttcctcagggcagacttcatctgcttcgtttgcctctgtggccccagcacgtggcacacactttattgatgctggatatgaaccaagcgaggctctcgctcgctacagaagactcaccgaggtctcagcacgacctctactttttccacatttataaaacgttttatgtgtatgggtgctttgcctacacatatgtttgtatattacatgcatacctgatgcccaagaaggccagaagaagccgggcgttggtggcccacgcctttaattccagcactcgggaggcagaggcagatggatctctgtgagttggagaccagcctggtctacaagagctagttccaggacagcctccaatgccacnnnnnnnnnnnnnnnnnnnnnnngaaggccagaagagggtgtcagatcccctggagttaagaggcagctgttagccaacaggagggtaccaggaaattgcacttaggtcttctggaagagcagtcagtgagccatctttccagctctgtttattactgtgtgtgtgtgtgtgtgtgtgtacactcgagcacgcacactcaagtacagtgcctgcagaggctagaagagggtgatgtgatcaatgattcccccaatctggagtgtattgtgagctgcttgctgtgtgggtgctgggaactgaacccaggtcccctgcaagaacagtgagtgctctagaccactgagccaactctccagccccactgttacctaggcagatcttcaacgtgttgtcgtcctgcctcaccttgagcaccagggactacagacctgtgccatcaggcacagcttcaattatctattgaatgagttacaattctcagatctcggaaggcactaacagttgcaggaaaggaattttttttttaagatttatttatcatgtatataacattctgcccccatgtatgcctgcacaccagaagagggcaccagatctcattatagatggttgtgagccaccatgtggttgccgggaattgaactcaggacctctggaagagcagtcagtgctcttaacctctgagccatctctccagccctgatttattattttttttttaatttatgtgtaccacgagctacatcccaagcatacattaagtctgatgacatgtgaccctatgttaaactaatagacctttttgtttcggtgacagtcccagaaatacaaattgagtttaagatgccagcatactgtctccccagtctccacccatctaagcaagcaacaatcccttacctgtctcatgaactcctttgtggtcaagacaagctcatggtaaagcaaccagcgtggctgttgttcaaagagagaggagttgggatgaataaacactgtctgctgctgcttcactgtgcggtagccactccgagtcagcctcgcggtgtggtaaaaataacccgaagtgatggcctaagatgcaggcaagaaaataaggttaggcgccatttgggggggtcttccacttcccacctctgagctcaggtttctggagaaccagaaaggtgaggaatcccagaagaacccactgactgacatgtgctgtccagggaggaatgggctccggtaagcaccagggaggagagctcaggcagggaaagtgtggtgtgcccctcagaagtggatatgtgtctgaggagagaagtgtgctgggtaacagtttcctctgagatggaaacatactgccctgcagtgaagctcttcaaacaacacaaagcagctctaggaggtcccaaaacctgaccagattcactaggcccctttccaccagagtaatcaataaacgccgtgtccctcagacacactaaggtgcaaagaagactctggaggcctgaccagctgcttggaagaaacaaaccaacagagctaccaaaagggttagaccaacagagccgcttgtaaagggtgttttccaacctgctgagctgcctgctggctgtgaagtgagctctagtttcccagcttttgtgagctgtcacccatagtgggttgggctttggtgacgcagctgtctgagtcatttcagctcctgtaagtaacaccgtaatccctcgctcatattcctacgagtaacccaaataaaactcactggttggccaagttaaactgttgtgggctccctgtctgtggtaagagacatgtgtagcatctgcccagaaaaagttttataacatagtgactcctgcgttgtccgctgacttacacacacactcataaacatacatgaaagaaagcaacaagatgccagtggtggcgcacacctttaattctggcacttgggaggaaggggcaggcggatctcttgagttcgaggtctatagagtgggttctagtatacccagggctacacagagaaaccctatcctgtaaaaaatgaaaagaaaaagacaaaacattaacaacaaaaaccctgaccttgcgcacacgaatgtagtctccttggcaggacgtcaagccaacttccacgcgctccaggagcccctccagctgttcccgcacatcccgggctcggcgcatggatctgaactgtacaaagttctcatagcaccactgagaagagtagccactctccgcccactgtgaagatgacgggtgtttagtacctatcaggacagacgtatcccacacttcccaaattcccacttgcccagtgacctgtgtgtacacattgagcagaaccaggtggtccccaccagggaggaagaagttgacacgggcgttgtcggcatggaccaccttgtccttgggccggtagaagatggagttgttgacagacagcatagcagccactgtcaggatctcttctgaacagctgtacctggtgtagggcagcaagagatgaggtcaaagcaagacaccaaagaacaaacgaggacagactctctgacctctctcttcctcttcttctttatttatttgcttatttattaatttattgtcttttttttttttttcaagacagcatttctctatgtaactgccctagcacttgatctgtagaccaggctggtcttgcattcacagagatcccacctgtctctgcctcccaagcaccaggattaaaagatatgccccgccactgcctgctgagatttctgatctcagacacagcaaaggaacatgtttttttgttgttgttgttaaagatttcttttatatgtataaaatgttttgcctgcatgtatgtgtgtgtgtcatatgcccgtggaagtcagaagaactgaagttaaagatggttatgagccaacacatgggtcttgggaattgaactcaggtcctctgcaagagcagctgatacatttaaccactgacattttttatggatggtcccatacagacctatctaaacaccctgtcctgaagccttggggttaatcaagttccagcagcccacacacacccatcacacaggaacgttgactcagggtcccagattttattttattaatctgtttgtgctatgaggcagggtctcattatgcagctctcactggcctgggactctaggtataccggctggccttgaactcagagaatccacctgcttctgcctctgctacaattactggccctgggtggtagctgtactaaccacttgtgcccacagactatcacaatcgagggcaggaccgtgactcacagaccgtctggggcctctaaaggggtgatgagccttcttaaataaagaccacgatggaaaaagaagacggaggggacacttgggactgaggaggcatggccacttggcgccagaagccgggcgggcgggtggacagacagacagacttacttctcagaggccaagatcatcttagacagcatgggatccacaggcagctccgccatctttcgaccagacttgaaagaaagaaagggaaaggtgaggcccgtcttccctcaggttccttccaccattacaggagcccttcatcctgtcccaggccatgctgtcctctcaccgtggtaagttcccccaggtggttgagggctcccagtgcataaagctgttccaaagccaacagcagggtctcgtagggtggagggtccaggaagtcaaagtgcatcaggtcgtggatccctggggaaaggagcgaaggattgagagagggccctaggcaagcaccagagcccgtcaggaggacgcgggctgccctgtcacctaggctcttcagcagcagcaccacattgcccaggcttgtcctctggatctcgggaaccgtggtctcctcgagctcgtgctgataggcccaggctgtgtacaggcggaagcacttccccgcggcgacccggcctgcacggccagcccgctgattggcagaggcctgaaaaggaaggagaggcagacacatggctagggcggtgttgactcaagagcctggagtatgtagaccactgatccctggtcctcaaatgctacttatggatcaaacattctctggaggaaccaatctgtctccctcgacctcacggagatgtgggctgaccttgctgcagggtgtgacggtgagagactccatgcccgtgcggggattgtagctcttctgcttgcagaaccctgggtccagcacgtaaatgatgccttcgatggtgagcgacgtttctgcgatgtttgttgccacaaccacctaagtgagaagacagcgtcgtcacccagggacccagcccacccgggcagcccaagaaagttcagtgcagtgaggaacagggcaaagggaggtcaggagacgaggtgagacctgcggcagggtgatggggcgtaacaaagaaatgagaccggatgtggggtttcccttcagagatggaagatggggatatctaggaccctgccctcccctccccaccaccatccgtacctgtctccacaaaccccctgcctctaaacctgcttctatcacccagcattcaggacggcccttttaaagtacttaaacctgtcaattcccacccagatccaaccacagaatcaacctacaccccttacagcctggactacttcacctgcggctgcctctctgatcacaccgatcatccacgtgctcaaaccccatgactcctgcatgcacaccctgctatccggtgctctgcaccggccctcccctcagcagggcagtcctcccagacagcgggctgggtccccctcctctttcctctactctaccctggcctttagagagcagcctcctgcccttcctcgtcctcagctccagtctgcttccatgttcccaggctatcctgaatctcttcactgcacccgacacaagctgacacggtttacacgcccactgtctcctcccgtcatactggaagtcttactttacccatcagtgtacccctcacctcaggcccccgccccagacagcgtgggctgggcctccacgctgggacctcacacatgctaggcaaatgttttaccacagagccacatctccaagccttcaataaataattgctcagtgaaggtcatgactctacttaaaattgtttggttcttaaaatctgagtgcatctggacaggggtggcgcatgcctttaatctcagcactcgaaggtggatataagttcaaagtcagcctggtctacagagtgagttccaggcagtcaggactacacagagaaaccctgtcttgaaaaaccaagatacatagaaataaatagatgatatggatgatagataggtagaaatagatacatagagataaatagatgcccatgtctgttcagctttggcttctgctgcaccacttgaaatccccaaacccactcctctcagacttcaaacatgcattgacttccctctgggactccccagacgtttccccaaaggttcactcaaatcctatgtcctggcaaacaaagctttccttggcctccggaacttgaagcttgctaactctcagctaatactgatttcatctctctcagcggaaggtgagagcctggctgctccctggctatgtccaatagcttggcaaacagctcgcagggacagcacgtgcttgcttcaacactcactgtgtgtgccacagggggaagagtaaaggcttgcctctcccactgaccttgcgggccccagggggtgtgggctggaagattcgggcctgcatgtctgagggcaggttggcataaatgggcagcaccaggagctcccggattttggaacccagacggcggcaacggtcctggagcatctcacaggcggcctcaatctcctcctgaatgtaggcagagcagggggtaggagtcacagaatccacacaccaggccatccttccccacttcccgccacagttcacacctgtccggtcaggaacaccagtatatccccagggggctgagtcacgtggatctgcagcacagacaccacacaggcttccaggtagtcggcctctggggcctgtggaggaggaggattcggggtcacagagggccaccagctcaagctcttctccatgctcagtgtatcttttacccacccaccccccccaacctgggtgtcccatgagatccttcccttggacagcctcctaaaccggccctacgcctctgcctcacaatgaagcccatcctcccaaggggcaccttggtatagaagatgtcaactggaaacctgcgtccagggattcggaagacgggggcgtcatcgaagaaggtggaaaaccgggcagtgtccagcgtggctgaagctaccaggaccttgagctcgggtcggaatcgagcaacatccttaattaacccgaagagaatgtctgtgtgcagggtccgttcatgagcttcatccaccatcaccacgctgtgggaggcaatgggacaggggtgagggggaagggacaggacagtgcgggattggctagcaggtagctggatgaaagggagggcgggtggagggactgggtaaggggaagtcaagcattgcggccaagaaaagcagtcaagatggcgttggtaaaatgttcaacagtaaaggcgctggccaccaagcctgaggacctgagtctgacccctggaacctacatggtgaaaggatagaactgattcctgcaagctgcctcctgagcccctacatggcacacacacacacacacacacacacacacacacacacacacacannnnnnnnnnnnnnnnnnnnnnnnnnnnnnnnnnnnnnnnnnnnnnnnnnnnnnnnnnnnnnnnnnnnnnnnnnnnnnnnnnnnnnnnnnnnnnnnnnnnnnnnnnnnnnnnnnnnnnnnnnnnnnnnnnnnnnnnnnnnnnnnnnnnnnnnnnnnnnnnnnnnnnnnnnnnnnnnnnnnnnnnnnnnnnnnnnnnnnnnnnnnnnnnnnnnnnnnnatacacacacacatacatatacacacacactcacatatacacacatatatacacatactcacatgcatacatatacacatacatacacacatacatatatacacacacatcgatacacacatatacatacataaatacgcacacacacacactcacatatacacacatactcacatgcatacatatacacatacatatatacacacacatcgatacacacatatacatacataaatacacacacacacacactcacatacatacacacatatacacacatgcatacatatatacacatacatgcatacatacaccgatacacacatatacatacataaatacacacacacacacacacacacacacacacacatatacacacatgcatacatatatacacatacatgcatacatacacacatacatatatacacacacatccatacacatatacattcataaatacacacacacacacacactcacatacatacacacatatacacgcatgcatacatatatacacatacatgcatacatacacacatacatatatacacacacatccatacacatatacattcataaatacacacacacatacatatacacacacactcacatatacacacatatatacacatactcacatgcatacatatacacatacatacacacatacatatatacacacacatacatacacacatatacattcataaatacacacacacacacacactcacatacatacacacatatacacacatgcatacatatatacacatacatgcatacatacacacatacatatatacacacacatcgatacacacatatacatacataaatacgcacacacacacactcacatatacacacatacatatacacatacatacacacatacatatatacacacacaggcatacacacacacacaggcatacacacacacacatacacacacatacatacacacatacacacacatacacatacacacacacacacatacacacacacacatacacacacatacatacacacatacacacacatacacacacatacatacacacatacacacatacacacacacacacttttttttttttcaaatgtaaaaaagccaacagggcagggaagtccggcagccaggacaggaacacgttgtcagtatctctgggtcagtcagaacagctattctcaccagaagaagcggaagttcgagcacgccttaaaggaaacaccgcttggccaggtggctgttgctgagacccacaagactgaggccagctcatgttacatagtgagtcccaggcctgcctgggctgtagaatgaaaccgtgtctcaaaacactaaagagatctggtgggttgagtatgtcggccgtgggaagaacgagattgaaggaaacaagagtctctgaggggcataggcagcaggagagaggtggtggtagagaacggttcgctctgatgtgcagtcctcaaagcggatgctgtagccaacctggccagagacaggtaggaggtaagattgaccagcgcccagacctgagatgtgggaccgtgaaagaggcttccctctcctgaatccccaaagaacttacctcattcccaagcttcacacccatctcccgggccactctggcagccacgctcatggccgccactcttcggggctgggtacaagcaatcttcatacccttctttgtgtagccctagaaagagaggagagagaggtgttcctctgccaggcatcctggggcgagccaggcagggcaggaaaagagaacggaaaagaacagactgagattagaaacgagggcccccaggggacgccgggccagccctgcagacctgcgcttacagtcagggctctgccagacttgaactgaccagggacagactggctggggcaacagccagaagccaggggagacgggaggtcagagagtaaggaaaacaagcgttttcattcttggttctctcgcccctgaaaggggaaggcagggtagaggtcacacggggctgaagcatgtcaggttcagattcatgctcttcatctctcgctgcttgcagggcagacccgtacgtcctcactcacacccggcacggtgtgacagcatcgagaacagaacggcagggaacctgatctgactgtgtctgaaaagcctcgggacttgcgcgacggacaggacaggccaggccaggccaggccagaccagggcaagacaggacaggacaggacaggccagaccaggccaggccaggccaggccaggccagaccaggacaggacaggacaggacaggacagggcaagacaggccaggacaggactcttgcaacccctccacacacacgggtctgccaaggctgactcaaggtccgggccgcagcgggcacggtgtgatggctgacctcctcgaagaggtactgcgggatctgtgtggtcttcccggagccggtctcgccttcgatgatgaggacttggtggctggcgatggcggccaggagctcctctcggaaggggaacacgggcaggctgcggcggacagcctggatggactccttctgctgggcctgggctgatgggggtggaactgacgacggctcctgaggaggaggaggaggaggaaggggatggagaatggggcccctgcccttttcagagtgtccgtccgtcccgtcccgtccccccccacagacgtcccagactcttgctggcacacacctcgtctccctgcagctgagcggctcggacgaactcgatggtctcgtcctcctccagcaccagctggtacttgggctcctgggcggcggcgtccctggccccgaacttgagggatgcagcacctagccgggcctcctcccagcgccgctgctcctctcctggggcgcccgattcctcctccacgacgtccacagctcgagctggctgcggagagaggcaaggctgcggggcctggcgaagggtggtcctagctgtcccctcgctccctccgcctgctgtgccccacccgtgagcagggggaggcggcgcccctcacctgtccccgagtctccttgggcatatggtaccggttggtggcctccagcttctcctgctcgccggccgcccggtactcccgggccaggtcccgcactcgacgcttgtacttgagctccctgcgctcgtgccggctcagctccacgtccccaaacaggacctcctcatccgccagctctgcctccaggtcctccagcttctcccgctcgcgctttgccaggtactcgcggcgagacttcttgcgaagctcggggacctgggccaggaaggacagtcacaacctcaccctaccagggaagcaacacagttccccactcgagagatgctggctgcctacgggacagcagaagccgagctgtgactcgaccccccggagtcaggagggtttgtaacttttcctggtggttcctgtcagtcagcccccccctgcgctacggactgagcaaccaccccacagtcaccacactctctccccagcccttcccgccatggccaaccgctccatcaatctttcttttgtcgacatttattatgtatgcagtgttctgcctgcatgtgtccctgcaggccagaaagagggcaccagatctcattacaggtggttgtgagccaccttgttttggtgggaattgaactcaggccctctggaggaccagcttgatctctaagccatctctctccagccctggatcttgcttcttgaacccggggtctcaccatggctttccggtcttcctcagccatcttgaggcgtttctgagcctcttcataagcctgggtagaagaaatcaggtaaatagggtcatgaggcccaaaagatatgcacatctacgaccattcccctcagaatgacaaatgtccttcactgccccttctcagtgaagagcctctgtgatttccaccaagcagtgaggcccttaaccagaaagctcacaggaccctgtttccccacacaggaaccctagcgacaacccttgtcttcccagcgacacctctgcaaccaaatccagatgtacctagcaatgttcttcacctttttttttttttttttaagattttatttgttatgtatacagccttctgcctgcaggccagcagagggcaccagatctcactcaaggtggtttgagccaccttgtggttgctgggaattgaactcaggacctctggaggaccagtcagtgctcttaacctctgagccatctctccagccctgttcttcaccttcttatctgatcgctccaggacattccgggtccggtccttgtccctctgccgcacccgctctgcaaacgcatcccgttcctccaagtcctgaagacgctcgcgctctgtccgctcccactcatcctctgaggccggcttctcctccgtgggtgacttactgtccctgaacccagcccagcgcatcatcaaagaggggtatcgagaaagcgtatcatccccacggccaaccacctgccccggctccctctctcctcggttctgacttaccccgtcttcctcttccctgcctcagaaacctcttcctcgtcctcttcctcctcctcgtggtgtttcttcctgaggtgtttccgtcttttccgcttcttctggaggctgctcgaatcgctgcccaccgcttcctccccgctctcgctgtcttccagcaacttataagatcggttcttctccagcagggctcgggcctctcgctcagctgcccgagctggcttttctaccacagccttccgtggtacctgtgagtcggaaacaagcggttgtgagcagctcctgcctcagcctcgagctcaaaccaggcgtcatcattctctgctcaatcgggccctcagcgtctgaacttccttccatgcatctgtttagcaaatgattattgaaaactacccgatggtggagggcgcgacccagcacccacaggttgccctcggacatccacccacaaatggatttttttttttcttttggttttttgagacagggtttctctgtggctttggaggctgtcctggaacactagctcttgtagaccaggctggtctcgaactcacaggcctgcctctgcctcccgagtgctgggattaaaggcgtgcgtcaccaccgcccggccaaacggatattttttaaatgatttattttttatgtgcatgtgttttgcctgcattgtgtctatgtgagggtgttggatcccctggaactggagtgacagacagttgtgagccgccttgcgggtgcttggaattgaatcagagacctctggaagagcagccagtgaccttaatctctgggccatctctctagccccacaacagaatttaaaaaaaaaaaaaaaaggcccagagttcaagtagtttacattctacaacccagttcccttttcacatttatcttttatttatttacgtgtatgggtacctgtgtgccacaagagacctggatgctgggaacttcagtcctcccgaagagcaacaagggttctctccgggtctccatcctatgtctaaatcgctaattcccacggctccactgttctcagcgactttcccccagtacttgggactgaaccccaaacttactgtacgctagacaagcactctaccaactgagatacgtcctcagccctgggggggggggggcggggctgcactgtattcaccgtggctaacaggaccctaggtttaagcatgcttgcacagccctctctgctaagtctcctccacagctctgtacctggggtaacagagggcaaaaggtggatgtttggcagagccgggcgggagtgctaggtctctctgctatgggaggcgctctctgtctctccgtctttctctctctgtgtgtctctgcaagttcgaagccagcccgtgcactacactgaaagttgcaggctatcctccgatacactgctagcttacgctccatcaccaggccaaagacgagcgtgcgtgcgtgcgtgcgtggagcggtctacatcagctcgggtggacggcacacaccttgctccagagcctgagcgcgaagtcccgcgccggcccgccggtgatgttgcgctcggtcagcaccagccctgtgtactagaaagagcgtttccagagagtgcgataaaaggaagagaaataaggtttaggaaacaaggcatagaacaaggtgctggggatattgctcagagaactcgagttcgattcccccagcacccatattgctcaaaaccaacgattcgtaactccagctccagggggaatccaacgccaaacacacacacacacacacacacacacacacacacacacacacacacacacaaaatagaatttgtgttatgnnnnnnnnnnnnnnnnnnnnnnnnnnnnnnnnnnnnnnnnnnnnnnnnnnnnnnnnnnnnnnnnnnnnnnnnnnnnnnnnnnnnnnnnnnnnnnnnnnnnnnnnnnnnnnnnnnnnnnnnnnnnnnnnnnnnnnnnnnnnnnnnnnnnnnnnnnnnnnnnnnnnnnnnnnnnnnnnnnnnngggtttctctgtggcttttggaggctgtcctggaactcactcttatagaccaggctggtctcaaactcacagagatccacctgtctctgttgggattaaaggcgtgctccaccacctcccggcaattaaaactatttttaaaaagtaatttaaagctacttactagaaatatgtatgttgggcgggagttccggtatcttaagatttttttctcgccggtcgttggcggtgcacccctttaatcccagcagaggcagggggatctctgtgagttccaggccagcctggtctccagagcgagtgccagcataggctccaaaactacacaagaaaccctgtctctaaaaaccaaaataaataaataaataaaagatttttttctcttttttattattaatttattttttatattccgatcccagttccccctccctcctttccacccctccctccactccccctcctcccatctgctccacagagagggtgaggcctccccagggaggtctactaagtctgtcccatcatctcactgaggcaggaccaaggcgcctctccagccccacacccctgtgtctaggcttggcaaggtatctctccacgtaggatgggctccactaagtcagtttgtgcattagagttagatcttggacccactgccagtggcctcatatattgtcccagtcacaccattgtcacctatgataagggagtctagtttggtcttatgcaggttccctaagatttttttttttaattatttatgtgcatgcgtgcttgccttcgtatcggcaccatgtatgtggaaaagtgcctttagatccgggatgtggtgcctctccacagctgcagttaaagacgattgagagcctgagttacctgatgtggattctgggaaccaaaaccaggtcctctgtaggaacagcgggtgctcctaaccactgaccgtctctgcagcccttctttctgttttttgtttatgtatctataaacattttacttgcgagtatgtacagcacccagaagcctcaagagggcactggatatcctgaaacggtagtaataggggagccattcatcgtgctgggtgttgaaacggggtcctctgcaagagcaacaagtgctcttcattgctaagctgtctctccagccacctctctccccccaaccccttttctttgttttgagtcagggtctcacacgcattagctggccttgtatatactatgtagctaaagttaaccttgaactctaaatctcctgatgctacttcctaagtgttgggattatagacatgtaccacacttgaaatatgtaatttatatacaatcaaaaataagaaaggttgctgctggtggtggtgacagcatactcctttaatcccagtactcaggaggcagaggaaagcagatctctgtgagtttgaggccagcctgatctacagagccagttccaggtcagccagggctacacagagaaaccctgtgtgtgtgtggggcggggggttagagggaaggaggcaagtattaagtatttcaaattggctgggcgtggtggcgtatgcctttaatcccagcactcgggaagcagaggcaggtggatctctgtgagtttgagaccagcctggtctacaagagtgagttccaggatagcctccaaagccacagggaaaccctgtctcaaaaaacaaaaaaaaacaaaaaaaaccaaaaaaaaagtatttcaaattgatagggtgcagggggaatgaataaggtcaaaatactcagtgttgaaaaagcaatcttcacgctgggagtgaagtggtgcacacctttaatcccagcactcaggaggcagagattcgagaccagccaggtctacaaagagagttccaggacagactccaaagctacagagaaaccctgtcttggggtgaatggtgggtggtgggaagcaatcttcacatagatgttattaacagcttagcgcatacctactgttaatggtttgctgtgagttaacccttcctagcacagatgaccgggagaagcaactcaatatctgagtttctggaaagtgtcctagagaggcacagatgtggcctctgaaatgtggctgatcacatgacctaagaggcaggactgagttctggaataatcaatagtctttatttcctttcccactttctgtaaagcctgcgctagagagcaaacggaagttttctaggatgctagtccactgctttgtcagatgcaagctttttgaataaaccacagctccaatactctcgtctctgcccctggtattccttgttggtgatagacagcacaagttacaaccggtcaggtccaggaaactaagcgtacaggacagtacatgcttgaatttgttcctatttgaggaattgaggccaaataatcatctgagccagggagatcccaaagaacatggggaggctctgccttttctgttgtttttggtagtattgccttggtttgctattgttcttttcttgtctcagtgacccaaatctagttgggatttgtttaagatttgtttttgggggctggagagatggctcagaggttaagagcaccagctgctcttccagaggtcctgagttcaattcccagcaaccacatggtggctcacaaccatctgtaatgatatctggtgccctctttctgacctgcagggatacatgcaggcagaacactgtatacataataaataaatctaaaaagaaagaaagaaagaaagaaagaaagaaagaaagggtgtgtttaaaaaaaaaaagagagagccaggcgttggtggcacacgcctttaatcccagcactcgggaggcagaggcaggtggatctctgtgagttcgagaccagcctggtctacaagagcaagttccagggcagcctccaaagccacagagaaacctagctcttgtaaaccaggctgatctcaaactcacagagatccaccagagagagagagagaaggggctggagagatggctcaatggttaaatgcacgggttactcttctagagagaatgtgtttgattcccaggccccagatggttccgggatgtctgatgccctctgccctccacagactccaggcacgaaggggtgcacagacatacatgcaggccaaacacccattcacacaaaatgaaaacggaggaaaattttaaaagagagagcaagaggcagcaagagcgttgaaaagagctccattttattatggaaaggtacaaaaagaaacaaaccaggcaattggtgaaggagcaacagggaggggtgaggcacccccgttagtccccccacactgcaattcaattcaatgtgaaccacgtgggggaacagaattaaataattctcatggggttcagagtgaggatccccagccttccctcttgggggaaactgaggcacagtaatactgagcaaagttgaagaaagccacataatctccgcaggtcactctcagtaggacaaacggagggtggtggattcctcgggaagtctgcaaataggcatagcttgtaaacctgggactttgagaggcgggaccgggagctggtgggcatgtaaaccaggctgtgatcaagcgaggagaaggaactgtaaacaaagggtagtgacctgggaaaagggtgcttgtgggtggagtgggttctagacctcccaagggagatgagcccttaaaccctgagtgtccccgggagtggcggcaagtcaaaggcggctgtggggacagtgtaccctgtcaaggagctggaggtgctccatctaactcaattccaggtgaatcctgtgttccactcaaagactcgatgctcgttcttagctcaccaagggtgctccagcccacgggggaccttgggttaggggtaaatttaggctactggctctgccccagaaacaggatgggaaaagcaagtcggaatatgctcattgcccttccctgccaggctcattgccagggtctgttggctctgaatcttccagactccaggatcttcaggtatggaagaggtatgtgcccaaactgggagatggtcaccgccggcaggactcatctgcaggaaaagaagtgatgaagatggagaatttgggggnnnnnnnnnnnnnnnnnnnnnnnnnnnnnnnnnnnnnagtctccccatgcaccctagaactgaggagggctggtgtgagagaagtctttacaatgtgttcggtgtgtgccagtcaccagcaacagtagcgatcacagttagctgggactgtgtactaggccccttgtttaatttcacaatcacctcatcaaaggtgaagtaacttaatatctagctatagtcctaggccttctgcaaaagtgtctggattctttcaacagctgcaggaggtagtgattattatcacattttcatggcgctgggaccttgcctgctcgtctgtttcagccagggtctcaatctgtagagcccaagcctccctggaactcactatgtagaccaggctgtccgtgtacttgtgtacttctatcccagcttaagtgatgggattacaggcatgagccacccatgctcagctctaggcaacaatcttatcaacaagctgcacactccgaagccccagacacagttattaactctgttttaaagaatgataaatgcagcctggtctacagagcgagttccaagacagccagggttacacagagaaaccctgtctcaaaacaaaaaaacaaaacaaaaacaaaacaaacaaaaagaatgataaaatgaaggctagggatactgaccagtggtataacactcacatagcgtgctaaaggccctggattcggttcctatagtgtgggcatgcacaccccacacaagataaactgaaaccgggctcgcacacgtatccgggatcacaccataagtaacagtaacgctggaattcatactaggggccgtctgacccaacttgggtatttttaaccaaactggagttctggttttgaaacgtggagactccgcgtctgcaggagccggttggaccacggacaccagggggcgccctccgccagccgcttacccacgattagggccttggtgcgcagcccgccctggagccctggctgcagcagcaactcctcctcctcctcgtcgtcgtcgtcatcaggctgggtcgccaaggggatgggagcactgggggcctcaggctccgggcccagatccgctagtaccgagctctctgaagggtactggaaggtggtctccagggctgtctcactgaaggagatcttgagctgaggatgtgaggcgaggggggaaaagagggcaagctcattactaaagcaccccaggggggtcccagagagcacttgcatggagggggcgggccgaagcttgattttttctctccttcaaatgacaccaaacaaaacaaagcttaggggctggagggatggctcagtgagtggttaagagcacttgctgctcttgcaggggacctggattcagttcctatcactcaccaggcccctcacaaccacctataatccctaggccctctacaggctccaggcaaaacactcatacacattaaaaaaaaaaaaaaaaaaaaaaaaaaaaaaannnnnnnnnnnnnnnnnnnnnnnnnnnnnnnnnnnnnnnnnnnnnnnnnnnnnnnnnnnnnnnnnnnnnnnnnnnnnnnnnnnnnnnnnnnnnnnnnnnnnnnnnnnnnnnnnnnnnnnnnnnnnnnnnnnnnnnnnnnnnnnnnnnnnnnnnnnnnnnnnnnnnnnnnnnnnnnnnnnnnnnnnnnnnnnnnnnnnnnnnnnnnnnnnnnnnnnnnnnnnnnnntgcttccatatatatctgcacaccagaaaagggcaccagatctcataacagatggttgtgagacaccatgtggttgctgggaattgaactcaggacctctggaagagcagctggtgctcttaacctctgagccatctctccagcccccaaaaacaaatcttaaacaaatcccaactagatttgggtcactgagctggctcagtgggtaagggtactcatacagtcaggtctgacgccctgagtttactctttggaacctctgacctacacacggtgctgtgtcaggtgtgtccccacctccaaaaccaagacaaaaaaacaaaaaaacaattatagaaacaaacaacaacaaaacagccaggtgtggtccctcataccagtaatttcaacactcagggggttgcactaagttccaggccagcctttcatgtctatcaaaactgtctaaataaaataaaaactaaaatggtgggcgtcggtggtagtgcacacctttaatcccaagcgctcaggaagcagaggcaggtgggtccctgtgagttgaggtcagcctggtctacagagagagttccaggacagccaggattgttatacagagaaaccctgcctcaaaacaaaacaaaagtgagctgagtatggagacacactcctttaaccctagcactcaggagaccagtctgaggccagcctgatctacattgttagaccctgtctttcaaagtaagccctcccatgcacacaccagaaaacaagagattttgtctgtggcaagggctgggaatttggtaagtaagattaagaccagatctctaccctttacagccatgaggcagaggtataaaaagaaactgaagtggacagagaggcagtgccgtggccaggactgggactctggggacattccgaaggaggtgaagtctgagctggccaagcaggaaaaagctggttgggaagggagtcccagaagggaccttgtcttccacagccatggggctttgatggtcccgaagaaacccaggctgcaaagagcctgcacctcccactccctttctcccatcccatcctacaggtccaggctggggattggataagacaatggaaaggcctatctgagccaagagatgctcaacacacagaagagtccccggaacatggaactggagaggtgacaaggatggagaagaaagtccaggcaaacactgggtaggggtggagaggaggccagacggtacctgcaaaaacagaagcagggctggagagatggctcagaggttaagagcactggctgctcttccagaggtcccaggttctattcccagcacccacatagcagctcacacctgtctgtagctccagttctaggggatctggtacccttacaccaatgcacataaaataaagttaaataaagtattaaaagaaaaaaaaaaaagcaaaagaccagagatgggtagaaccccttaaaaacaacaggctgtcttcggggtccctttgcccttcccctttgccctcctaaggaggacacagtgggattaactctgtaaaccagagggtttagggagacaaagaggagggattccaggcgatctacccagggtatctgcgggccagcatcccagggcctccatgtcatctataatgtgggctgcaagaggctgaggagagagatgtcacagcttggtacctcaggaaagcagggtgaccaagactgtgtatgtcatgcttgaggtccaaatcctgcaatgacttcttttcttaatctcactttgaacaaaatccagagcctaactgaaggcaacaggtggtttccctccgctcccaggtgcatccctctgcctgggatattcttcccccaaatgccccccaggctcctcaactccagggcattctgtttgggagttgccacatcctactctgtgtcctgaccctgtcgcacacaaccttgcactaatacctccatacacattaacctccttctaacctgctggggaacctgttaatgtcttgggggagtctgtagtaagacctcttcacacagaatgcccaagtgtgctcaagtcctccatgtaccttcaagtttatcatttattttgttctggggactctccccccccccccattttatgtttagcgttttgtctacatgtctgtgcaccctgtgcggtcggtgccagaaaaggccagaagagggcatcatatcccctggaaaactgggatggaggattaagagccaccatggaagcgctgggaactgaatccaggttccccaaaagagcagcaagtgctcttttttttttggggggggggggttagagacagggtttctctgtggctttggaggctgtcctggaactagctcttgtaaaccaggctgatctcaaactcacagagatccacctgcctctgcctcccgagtgctcggattaaaggtgtgagccaccaacgccctgcaagttgggactgctgtttccgcccggtgcaacaagtgctcctaacggctgcaccatctctccagtcatcatttattattattatttttgagactggggctcactaaatagcccaggctggccttgagcttaacacccacagatggaattacaagtccgagcctgagtgttttcggtctgtgcttggctgaaaccgtgtgtgcagaagaagactgagtgtactggctgctcatatacacggttgccctgaaagggaatttaccagttgccacacctgtctagacatcaggtgaggtcccagcagaggatcaaggctaggagggaaggccgacagaataagggacaccctccagatgggccacaccccggaatctggaaagggacccattctggttctcctcttcctcagttccccttctcagccctgcatttatcagttctgtaaaaagattcattgtatccacttcagcgacttcggcgacttcagcatcaccccttgtgcctcactccccccagttctgactgggcttctcaggaatgcacagccccaatggggggggtagggcagggagggaagtgactcactggctcctctctcatcagctatataaggtcacaagggggccagggaaggaggggcgggtctccagccagagaggccgctggctgaggaagagcaccagctcagctaacaacagcctggttcagggcaggggtggcgtctctcacgatgatgcagtctgaaaaggaactactcaggaaagggtgagggacggtggtaatggctgggtcgagcagggcaaggcacattaatgctcgctgaggctgtacagaggcggaggggtagataagatggtcatgtctagggtagacctcggctgcctgctccccacccccacccaccccactggtcccccggtgtggctggcttcctgattctctcaccacatcctgagcacagctctggcaggtccccaggcccagtgttcccactcagtaccaccagccttccggcccccaccccaggcttcctgtttggaaggtctgcttccgcccctcctatttgatgacctaggtatggtcaccatcaacagggcctgctctgcactgggttcctcggcttcccccagatggttcctaggctcgggccacaaagccctatgtcgccgccctctgctcatttcccaaagacacaaggcagcctcagtaggaagcgacttttctaagcgcctcgccctgggagaagttcctgagaggagagggccaatagcagtttgagggctcagggtacatacgctcttaggaccacccctggagcttcagtgaagctgggacagaggcgagaggacagaagtcacattcagacattgctacaatgaaaatgagcattctgcacatagactaaaaacaacaagatgaactgggagcaaccacgtgaccccgatctttggtcttcaccgtttcccaccgacaccaaacagacacagttaaatagaataaggaggggcaggctgcacaggccctgggaagatgcatgctggttgggcggaagactttctttctggtctgagacacctgagtgtaagcactgttcttccccagagagtttttactgaggaaaccgattggagcagaggaggaaggtgctgggccaggacagagggagaagttatcctgtccagtgtttccttgtatgtctacattccagtgtaacctctgacctctgctggccccagctccacccctgcccccaactcccacagtgcctgagccagtctctctgctcagttcagtgcaaatgaacttctctctttttctaccccaaggggagggagaggccagggtaggagggacagaggggaaaaccaaggctgagccagttctgtgggggaggggacgcccagggaggaaagatgggggaagggactgggatattttggaagaggagaaggcttttcttgtccccagagagaaggaagcactgtctaacattggcccagttggggggacagacaaccctgaggtcacccacttcaaatggcgtctgtatgcctctgctggggaggggggtagctaacttggggtctaaaagctttctgtctgctcttcagccagctctgctctatctcactaggctctctcctcaggacgttctcgttcagttctgccccttctttcttggaactgagaccctcaccccaacttccctgaacttctcccctccacgtctgccctcccgggtattttcaccctgccttcatggttacaaggtggttatctcttctctcctaccagaagggcctggctgggtcaaaacctcaaaagaaagggagagagagagagagagagagagagagagagagagagagtgagaaggaacagggccggacacaccccaacacagcagttgacttctgtgcagaatccttggtgctcccaaatgaatggcaaaggagggctacccggaggaagggtgtgtatgcaggaggaggaagggaggcggcagggataaaaaatagaagacgagagcgcaggcatataaaaaagccatccagtcagagctggaaggagacttctctacccagtcaggcgtggcagctttcttacctgtttgtgatgtctttccggggaccccttggcaaggcagctgcggctgagacggaggtagccccccagcaccaagatttcctcagcagttgggtaccgcttcttcccgggtccaggccctgcagcatcagcggtggcaggggtggccggaggggctgggctggcagggggcacacacctccgtgggttgacagtgaaggtgtgtccgctgcggcggggggcccccacccccggccctgcctccactccacagaacgtcccggcccctgcgtgctccggtgggaggggggagggcccagagcagaggttctgctgagctctcagaggcctgctctgagcctccgcctcctccgtctcagcctccctctcagcctccacaccagactgccccaggtgtttctctggagatgctggaggacctggcttctgaggagtctctatgtcccgagacgcccgttctcgagccttcccagagttcagggtccatttccagccctcagtgggcctggagatcctgtctccatcctccgcggggctggacctcagctcagcagactgcacttctccagaggcggtgtcttgaacctcctttgtcactggagactggtctagggcaatccctggactcagtgtctcttcctttcttccagactcctctaagtagtcttttctctcttcccttgagttcagcctccactctgcggcctccggctgtatcaagctctgtttctggggttctttcgggtcaagattccatttatgggcctcaggcaggcaggccttctggtcaccagactcccccaggctcagtctgctttccgatacctcttttctcttgggactgtggtctccaggacttgccaatctcagactctcctctggagtttctccagggctcagcctccatttctgagcctctgctggtctggaactcaggtctctggcttctgcagggctctgcctccagtctccactctccaaagtcctggagcatgactcttgggctccccctatcaccagcctcctatctctggtctccctgggacttagtctctcctctcttgactctcttcccttggggctctgttctcttaaattaccaggacttgatctccgctctgcagcctcgagaggcccgggctttctatctgcaagcatttcatttcgctgctgcagctcctgctgccgctgtcgctcctgctggatgaatcggttctgatgtaccggcccaatggcctccaagaggacagcgggttcatctgggtctggaggtccagcctctgcagtcccagacacagagctcgcctctccaggaggcaggcccaacttggctctgcgtcgttccagaatcccccgcttccaggctggcatctgggacaggcgatcccgttctgctttctcacggccacgaaccgctgcctcctcctgcctccgccgggctagcaactgtagcttccagtctgggatagcggtcatggtcactggaagtgaggaaggagagagcactcggggacggaacaggaagggtaggcttcggaggggcccggcgactgagaatgggggtggaggaggaggaggaagtgatgcgggaagagacttaagagcagagggcagtggagctaaggatgaagagagagggaaaccgggagaggagggagggcagaagaggcaagaactggaaaagtgaagagcaaagctgggtgccaagttgggggtggggataatgggagaggaagagtcgagattccgggcagaggcagcgccagattgggggttagtgggcaccagatagtccctaagacatgagaaagggagggaaggaaaagcaggggagaggagaagacggggatgggggctgagaagtgagcgcgttcagtccaggctgcctccccggtacccaggggagacaagtgggaaggaagaaccgggaaccggccggcgagggggctcaacttacacgccttggggtccctaggaggaggtgcggtggagccaggcgtcgggagagaggaagaggagcacagaggcagagggaggtccggagggaggagggaagaggcagcccgggaggagggacggggacgcagacgggggccaggcgggggcggggaccgctttgtctacggacaatggggcgagggaagggggcgcagggcggagcccggcgcagggcggggcttcgccgccctgcttcccgcgtgggaccctgcggtggcactcccctcctgcagtggggcagcccacagctcttcgttctgtctccagaggccctcacccacttcctctggcagccctggagaagctgggtgtccagacctcttgctccagctggccgacccggggcgtcggcccgtgactcaggccccctgagggacacggggaggaagcggcagctgcttggagtcggacccgcccttcccatcgctcgccgctcctccccgtgctttttgctctccttggccagtctttgttaccgtggtggtgtgggcggctgccaggccccaaagtctgaggcaaatggctttgggagtttgctctcctcccagagatttactcttgtctcccacgggttgcctgatctataggcggagaaattgtaatatttggagggagcaggactgggtgactgggagatgggggcgggcccttggggtgtggccccagcccagcgggcgtcacagtgcttggctgctcctacaagaacttgctcggcctcggcttctttcccacacttggtcctgcggcttgagagacagggacagacaactgaacaccatatgtaaaaaattttttttttatttttatgcagcgcataccctttgggagagcagggagccctgagtcagcccgagttaaaaacagaaaacaaaaaaacgagagacatcgctgtagaagacccaattaaaaaactggagacaacaaggagctgtaaggcagggatggggggaaatgcacaaccgcggtgcagaggagatagccaactacctgcaaacttgcagactggccttgacatagctccctgaagtggaagctaggaaggggaatccctgaggtgtagagccagtaacaatgccagggcagtgagtgctcaaggcaggacccttagcctctgtgtgtgcgtatgggaagccccaagagatgagattcgtgtgtgagtgtcacaccccaagagttgagatgagattcatgaaannnnnnnnnnnnnnnnnnnnnnnnnnnnnnnnnnnnnnnnnnnnnnnnnnnnnnnnnnnnnnnnnnnnnnnnnnnnnnnnnnnnnnnnnnnnnnnnnnnnnnnnnnnnnnagaggtagatggacctaaggtttccagcctctggtctggagcaaacaacagggcctggattaaggggttttgattttgagatagctcaacggctggccgatagctcctcattctgcttccccatcctggggtctggagaggagctggagttttctttgtaattgggaccgaaggtagcggagatcttgctggtcgagcccgtgagccaagccaaggtagagggtaaggagaagagccaggaggaggcgatccgtgcccaacgtggggaccacccatagcactgtcagaagttccacacatactgggtgtcgaaggtgggaaaagagcctcagggcccgaggagacttcagggccagaggttcacccagccccagtacgtggtaatatacctaggagagagattacagcatggaaatcaagctctctttcttagctgactctgacctcttcctggcaccaccttgttagaaatcaggcccaggaccctttttgagactctaccccaacctgtctctggtccaggcgtcatgctcaagcccaaagacctatagttattggtctctgaaggaaagctgaaggaagacagacaatcataaaagggaccagaaagccgagaggagttgtcgggagggtacgggagggagaggattgtggacataggtctcaggcagggatgtgggatcctcacctgtttgaggcccatgagttcagcgtagtcaaacaccagtaggatgctgaagatgaggagccaggaaacgacatggagcacaaagcagaggaggggcacccaggtggcccacggttcagcccgagcctcccacaacacagggcctctgggtacagtctcccagtaccgcatcaccagctggggaaagacgagacactaggcatgccagtggtctcccttgccccatggtaacctacaactctttcgcccaggtatgaagtatttaccatgcggagggttctggatcgggtactgaggatatgaagacaacccatttctacacaggatttacagaatgtttgggatgggggctggtggatatccaccagagatccaccagactagcctatggcaaacatccagtgagaagactaagctgaaggcgtcttctcttgagacaagataggaactaaggagaaattaagatctcaagcaaggccgggcgttagtggcgaaaacctttaatcccagcactcaggaggcagaggcaggtggatctctgtgagttcgagaccagcctggtctacaagagctagttccaggacagcctccaaagccacagagaaaccctgtctcgaaaaacaaaaaaacaaacaaaaaaaagatctcaagcaagctgggcagtggtggtgcacacctgttgtcccaatgctcaggaggcagaggctggtggatctctgagttccaggacagccaggctacacagagaaaccctgactcaaaagaatcatactgtactgggacatgtcaaaaacagaactttgctgacagaatggaatatacgctctgggagaatggaagctgagatgagcatcctctgtttcttatgcactcatcttgtccctccagtgtaagcacaccatgcatgtcccttggcaatgcctcatacctgcaaggccagggcagtgcatgccacatacagtgacctctgaaggactccaaagtaccgggatgtccatgtcttcactgtctcagttgccatgaggctgtgttgcaccacaaacaatagcagaaggcccagatcccaggccagggaagtcagaatgcttcggtcctgcaaggcagccaaccacccatagcgggcctctggggggtgggggtgggggagaaagggacaaagggacagttgaagtgactagaacattccccttaccctcatcttttttggggggagggtttcgagtcagggtttctctgtggctttggagcctgtcctggaactagctcttgtagaccaggctggtctccaactcagagagatctgcctgcctctgcctcccgagtgctgggactaaaggcgtgcaccatcaccgcccggctaccctcatcttcttttggagtcctataccatgtccccgatgctttcaggatcttgtcaaagccatacccagttcgatttcctgttctttccatcttccctggtttccttctggggaagaaggctctcaggagaatgcaggcaggggccgttattaaagccaccgtgggagggctggggaggtggctcagtccattagtgcactgaattctaccctcaggacccctacaaaaagcccagcacggcggtgtgtggtggtaatctcaatgctggggaggcagcgggcaggaggatcagcagaggggcctgtgccatcgctcagtggttaagagcaccggctgctcttcaaaaggacctggtttgtttggttctctgcacccacatggcggctcacagccatctataaccccagttctaggagatccgtctgacatagttggcaggcctctgatttcaacgacagactgtccccaaaatacttaggaggcagaggtagatggaccaatgagttccaagccagcttggggtaaatagcaagtacctgtctaaaaacaaaaaagtggctagttcctgcagacagatcaagactggccttcagctgcgcctgcacacacagaaacaaacacaagcacacattcctcattattcacactcacacacagcaaggctggggaagtcatctttggtgtggctttttttgttgtttttgagacagggtctctctctacatacataacccttactcagcagaccaggctggccttgaacgcggagatgggcttgtctctgcctctccggtgctaggatcaaaggcgtgcgccaccatggcccgcttcgcggtctcctaatgtttcctctttttacctttcccctgtccctagttctccccacgaaagcctacccccacccctgcataccctgtcagccctcactccccagcttctgcaccgggctaatcttggagtttctgatttagccttctgttcccttccctgcggcgcctggcagctttggcgtttccctgtcatttgtttccgcgccccgccctctccacgctgctctggctcctcctctccgcttcagctcgccctggatccctgcggctcacccggaccgccggactccgggatccctccaagcagcggccgcagggaggtgaaacgcacgaactccactccggtgccaaaggccaggatgaaggaggcgagggccgccgagaccagcagcagcgccggggccatggcgagcggtaagcagcttgccgaggaggcggacccgggggtcccgcggcttggtaaggccnnnnnnnnnngctcggcagccacgcgcgtgggtcgaatcttagtgcggccagtgttctcatggaaagtgaggacagagcctcccttgcgtggaaacaagaagaacgtcctgttttttttttacaatagccactccttatcctccagtctcagtccctggtgtgtggggttacacgcggtgccgccacgccccacgatggttcctgcctgtaattctagtactctgaaggccgaggcagcaggattgaagttagcttcgactgcacatggagacgcagtccgaaagaggcataaaaaatgaaaaagaccatgtggtgaaagggtcagtccgtagctatcctagtacaggttcctcagttttcagatagaacaaggtcattgagataaaaatgccccacacaagcaaaggcaaggccctcaggctgagcgataggggaccgtctaggagcacccacgctggatgctccctctgctgcggggccaggctgccttgcgttgctaacacatttcctccccagcctgctctctgcttgggaaatttgtactgagtgggctgcgtccgagaatatcagtgtctttggggaagttccctctgcatactgctctctccactttttaaatggcagaatcttcatgtagtcaggactggcattgaacttgctagtatgtagctgagaatggtcttgaattgatcctcctccctctgcctccaagtgctggtattacagtataacaccatagtctggctccaccgttttaggggctctgaagagcttgtaggtgggaaacaagggctgcactaagctttgtggtttctctttacccagcttcatccttaaacatattcataatccaagtcctaggaaggcagatgcttagggctcacctgccggccagccagcctagcctaattagggagccccatgtcccagtgagataccctgtctcaaggaaaacaaagtggactcctgaagaaggacacccaaggccgacttctggcttacccaggcaccaaattaacagaggtctggggctacagtttaatgtgaagtatttatttgagtagcattgctgaatccccaacaccctcaaaagtaaaatccatagaggcacagcatacggcaggggtgtgaacaggccgactttgatgccctcacctggagagggcaactaggtgacatatacaacaccagagtagttctggaagcattgcagaaaagtatacaaagtagcaactatatttttattgaaatgaaattcacataaaaaagagacatttagcacagtagcatttaatattctgcactatgtacaacctctttctttctggctccaatactctcaacttctcacaatgaaacgctagactccttgagcagcacccctgtcctcagagtctgggatgcactgatctgtttttttttttttttaaagagtttattatgtatacaacattctgcccccatgtatgcctgcacaccagaagagggcaccagatctcattacagatggttgtgagccaccatgtggttgctgggaattgaactcaggacctctggaagagcagtcagtgctcttaacctcagagccatatttccagcccaacactgatctattcttaccttcatgaattcacccattctggatctatctcaggcagatggaatcaaatgtgtcctctgtgtctgggccttttacttagggtcttcttgacactcgccctcaaatacttcatgtctgagcattcctttttgtgcacacagcacatttatatcttcatccttgctgaacaaacatctacggtttctgttggcttttcgagacagggtttctctgtgtagtcctggctgtccaggaattagctctgtagaccaggctggtcttgaactcagagtttcacctgctctgcctcctgagtgctgtggttacagttgtgtgccaccactgcccagccgtctacagtacttctatatttggccatcttgaaaagtaataaggggctggaatgaggctaagtggcaaagtgattgcctaggaagcattaaaaaaaaaaaaacatacttcccccccccaaaaaaaacatcaagtgcctgtttttcatttttgagtctcttgtagctttaggctagcctccaatttgctatgtagccaaagctgaccttgaacttctgatcccacttgcccctacctgcacagctggaattcgaggccaagtgcagggggcagagccattctgctgggtcatatggttatcaggcaggccagatgacctaccatagagatgatgaaaactaacctcggaaaaacacaaaacaaacaaaaccctgtttctgttaagacagggttttcctcagtaacccattctgaactgggacttttggccatcctgcttcagcgtctacatactgggactatgggaaatgctcctgaccagctttttacttatcttcaaaggaacttgcaaactgttgactgcagaggccaaaccaaacacgagcagtacccaagagtcctactttctccacaccctagaaagtgaccagcttttaaaaacaaatgcgatttaccgatttactctaaatcgatactgataaatgaatgcaagttcaaaacggtcttatgccactccagaaattcaccattagggaggctgagtgagcaaccgaccctccacagagatgaccaaagctaacagcaaacactggaaaagcaggccatgtgcagcaaaactaaaagccctttctatccaggagtcacagaccagaaaacatcccatgagccaccctcatcttctcagtcaggtatgcctgggaactggtaagaatcccgggaagacaaggaagggggccaaaaccaggcagggtgctgggactgcaacagcggcttagccattgtggctgcaggctgctgactgaaccagggccttcaccactgatgacaagtgctctgccacaccaccacaaccccagcttgggttggccaatttaaaaatggatatcttaggggggaaaaaaatcctttttctttttcaaaaactctttggtcttatacacattcccaaagaagttgtatcaatacaatacatcttagaccttgagggttttttgttttttattttggtttttgagacagaatttcactaggtagccctggctggcctggaattcataaaaatctgcctacttctgccttccaagtgctgactgagataaaaggtgtggaccaccttgtgtagtcttaattgtgtgtgttccttttttcaaatattttctaggaatgtttgctggtctgagagggtagaggtagattttttttttaggtggagaacatttcctaatttgaaaggacaaaggcctctggtgtgacttcctgctttagcactccagtcaggaggaactcaggagagaggaggggcagccccagtcgagatgggatagcgcagcgaggtaggtcttcagtgcaagttatgacaactcggtaaggctgtaaagacacagcagagacagttaggaaggaagggcctggaacaggtgcagggtcagagccctaaaagctgtctcagaactgagactgcatacatttacagtatatgtatagcatgcatgaagcacactgcctatcctatcaagtgtccttgccccgggtggtggtggtgcacgcctttagtctcagcactcgggaggcagaggcagggggaaatctctgtgagttcgagaccagcctggtctacaagagcaagttccaggacagactccaaagccacagagaaaccctgtcttgaaaaacaaaacaaaacaaaacaaacaaacaaaaaaaaggtgggctgaactgtttgagttaacctttggggcaaggacactatttatttatttatttatttatttatttataaaggtgtgtgccatcaccgccacctggctcctcttgactccacctcccgggtgctgggattacaggtctttattactgagtccagttcatgagtgctgggctccaagctacagagaaaccctgttgtaacacaaatattaaaaacccagagatattggggttcaagctgacagtcagttaagcaaagcagttaagccactagctcttgacgtctagctcagactaaattgtgagatcccatctccaccaatcatcagaatgcaatcccagactgctatgctctccttcagcatggctggagactgactgccacatgtgaccctttgcttcttccctttatacctctcaagtcctggggttaaaggcatgggatcccaagtgctaagacctttgtatgggctgtttctcttttagagtggatcaatctcatgcagttcaatgtagccttgagctaacagaaatccatctacctctgtctccagagtcctgggattaaaggtgtataccaccaccgcttggcttctatggctaaatagtgtagctggctttgcattctgatacttcaggcaatctttattaaaccataaatatcaccacattctgtctcggaaaaaaaaaaaaagaaagaaagaaaaagaaatgagaccagcctggtctacaagagcgagttccaggacaggctccaaagctacacagagaaaccctgtctgggggggggatggggttagtgatgttttgggcaggagatgggtaatggcagagactcactcaaagtatatggacttttttttaaattaaaataaatgggagtggagaggttcagcaattaatagcacctgttgctcttgtagagaacccaggtttggttcccagcacccacatggtgctcatagcaatctgtaactccagtttcaggagtgcctgaccagtgcctgacctctaccaacaccaggtacacaaatggtgcatagacatacaatccggtgaaaaatctacacacataaaataagtaacttttgtttgtttgtttttcgagacaggatttctctatgtaatagttctggctgtcctggaactagctttgtagaccaggctggccttgaactcacagagatctgcctgcctctgcctcccaagtgcagggattaaaggcatgtgccaccaatgccaggcaataaataagtcttaataagtaaattaaacaaatatgaggaattgtaataaaatacattctcgaaaagaatctggaaaatattgacacataattgtgtgtgtgtgtgtgtgtgtgtgtgtgtgtgtgtgtgtgtgtgtgtgtgtctgtttgcctttaattccagcacttgggagacagagggtttcaaattcctttttactggagttagtgtttgtaagacacctgatgtgggtgctgggatctcgtgctcaggatacagcaacaagtttcttaaccaatgagccatcatctctccagtccctattctctgtacataatatagattaaaaaaaatatctggggggtgggggaacagagtcccatgcagtccagactgctattccacatgcgtatatccctagaacttctgctcctcttgcagagctgtaatgccaatgtgtggtgtggcaccacacctggctacttggaaacacagctaagcccactggtgtcagcgcctcttcccttccctccaccctgtgctctccccactgctaaggccaggccaggcctgccctaccttataggactggggcatgctgggcaggttggtgcccccacagcagctgatgatctcgcccatctgaggtgggggtggctgcactccaggggtcacgtaaatctcatagccctaaggaagaggagtggtggagacagatgtctgcactgagaggctaaggcgattgggaaacctcttgggggtaccaggggtagtagggaagcatggtgcagaaggcagcctctcacctccagcagtttttgttgccgagcccggctcagggagtcccgaaggctgaagctaaagttcttctcttgttcagggtcagtcaccaagtagtcatcaggtggcaggaagtgaccagcctttctggactaagggaaagaacgggcaggacaccttttcatctgaaaactccttgtgtcttcctctcctccacagtattgaggaatgaccccaagacatcaagcatgctaggcaagtgctctaccactgattcattcaggccctaacaagaaatatctattcaaagcagtcttggcctcacgggtgctccattctccacctcctttcctcccactgcttccttgagggtaggtgagcgggcctttcctttcctgccactcctcgtcttctggcttcttacctgatacagccagttcagggagaggatagggatgcccttccccagggcacacaagaacttgaccgttcttcggatgcgatcagtgaccaagtgggaggcctcatttactgagctggctagactgccacccagagccaggactgcacgctctccccgagaatccacaactcctgtgaacagtacctgggggatggagtgaaggtggtcacagcaaccctcatcagcagcactcacctctcagtccccagcccctcatctcctaccttgggggctgctgcttcttggttaggtttagcccgccggctccgacttgggtttccctgggtctcatcctctacacggtccctctttcttttgccgggtgttggaattgctatctcctgaggctaaaaaacatcacattgggcgtttgagtccttcctataactcttgctcctacctaggggccccagctgtctgtactcttacctcttccttcactggcatttcctcaggatcttcttccttggggactattgtcttctggggtatttgtcttcggggacgtttttgaattggtgaggttgtggtagtagaaggcttcttgcgggatcgagaaacctcaggctggggcttgggaatgagccctgatctcccagctgcttcattttgcaccacgggattctgagtggaggtctctggagcctgggaaacagcaggctcaggagcaacagtaatagactcagcggcttccaatgccaagccttgattgattgaagattgggaaccaggttcagagggtgcagagtaaggcttttggccaatgggaactgtgtgggagccccgtttcccagcagccttccgccgccttcggtggttggcttgaggaatgggctccaggagaacaggctgggctgtggggacaggtggctggagttcagaggtggcagaaactggagaagcacttagtggtgaagactttagtgttatgctctgacctgtcacctcaggggcaacaaggtctgtggagatgggaggttcaaaatcagaggctactggtccaactgattcagaatcctcaatggaggacttacatgcccttcccaaagtgcccagagctgtggaggtgggaagctggaggtcaggaccagtggggacagctggttctggggttctgacagacttacgtgacctgccccgagtggcccgagatgtgggtttaggtgtgacaggctgttctgtggaggtgggaggctggaggtcaggaccagtggggacagctggttctggggtcctggtagaagacttacgtgacctgccccgagcagcccgagatgtgggtttaggtatgacaggctgttctgtggaggtgggaggctggaggtcaggaccagtgggagtaagtggttctggggtctggatggaagacctatgtggcctgccccgagtggcctgaggtgtggggtttggggtaacaggctgttctgtggaggtgggaggctggattttgggacctgtgagaacaactggttcaggcgttttaacaaaggaaccatttatgctgccctgagtgactggagatgtgggtttggggatgacagactgttctgtggaggtgggaggttgaagctcagagtctgtagggacaactggttccggggtcctggtagaggacctatttgccctgcccctgccccgagtagcccgagatgttggtctaggggcagcaggcaggtttgtggggcaggtagtatagggcttaagggcagcagaggagtgtggggaggaggtcatcctggaggaccgccgaggcctgacattaggcttggtgtgaggagtttcaggaaggtgtagctcagaagggggagaggtaagtaacagagactggggtgtagacggcttttggctctgagaggtgagcagactctgaggtggagaagaagcttcaggaactggagaaagcaggcgatgggccgagggttctggatcaccctgaggaggaaaagcaagtgataaaaggcagcaagaaggaggtgggccaggctggagagatggctcagtggttaagagcactggctgctcttcctgaggacctgagttcaattcccagcacccacatggcagctcacaactgtctgtaacctcagttccatggggatctgacactctcacacagacatatgtgtaggcaaaacaccaatgaacataaaataattaaaaaaaaaaaagaggtaagcatggatcttgatctatcctagtgtttctgaagaagggcctcatgtgactgcagtgtcctccacttattcttctacctctgttgccaagtgctaggatgacaggcccgttaggttagtacgactggctttgattctgttgatggtcacagcatgctcactggccacttctttctgtgtcctctctttaggctaggaactccttgagagaggaagcaatcttttggataccataagggatctctcttcataactttagtacagtgttctgtacaggtgggtgtacacagtaactaagacacggctgggcagatagggcagtagcacaaagagatttgtgagtcaataaagggaactgccacttgggaacaatgggacacaggaatagacgccaagtaatgagtgacaatgaagaaaacgggaatgtgggactagggaaacagttcagtaggcaaagcaagcaactaggatctgaatttgatctccagaacccatggaataaaagccaggcagagtgacatatgcttgtcacccagtgctaggcaggtagatatgactgccctcagagcttgctggtctagcatcccagtctatgtcagcaaattctaagacagctcaggatcctgacccccacccttcaaaaaagttgagtggttcctgaagaataacgtacagcttgtcactaggcttcctcactcaccgcccccaaacacacaccctcacaaacatgcatagatgtgcatgcagttaggaaaacaggaactataaacaaaggtacagattaaaggcaggctaggcaatgtggctgcagggacggggacaacatgtgaagtaggagcaggacaaaaatgtagctcacccttgagtcctctccagcagatgccatcttgcaactcaattggcctaatcagagaataaaacaggagaggatgagtgctgtgcagcccgcagctcagggtcccgcccaggggccagctgttaagaggttacatagcatgccgcccttgcttccctctcggctgcctcccaagactcaaaggtccccctttcctccatctccctggctcccagagactatcagggttgatgcaagtccctcaaggtcccccatgcctaacccagggctcgctccctccctgtcgcccctctatccagggtcacttctgcttccccacttgtgtctcttctgtgtgtctttgcacatctccatttctcccttcatactctccttactcccttcagggtccacccccttccccaagccagactctatccctgtctgtctctagccagcaccttccttggtcctctccaccctgaggagttcttccccccacccgtcacgtcttcccccaactgtctgctgtgttctttggtatacccatggctttctccacagtttgcatctctccgccttcaattcccagcggctctgtgtgaaccagatgctgctgtcctgctgatgcactagacacagatgggtgggattcatgagctgcagggtgggtgtccatgagctgcagttcagaggcctcagcttctctcagacaaaacggctgtgtagctaagacttcccaaggcacatcctgggcacctggacctaaagaggatcagaaaaaggaaataggcatgcaggtaaaaaagacaataaggctaagaactaggctaagactcacaaaaggctaagtgggttacttaaggcaagctagaagtaagggtggtagttatgacactgaatactatttagaagattataatctctccttcaggaggctcatctggaaaataaggactgtgtatgtggctgaggagagcattcacctggcatgcataaagccctgagttcaacctctggcatgtagacacaaaaattgagtttctgggccaatcccaaatctcctgaactagaatcagggtaagacccaggaatctgctttgatgtgttatcttatcttttaagatgtatttagaaatgtttcttcatatgtatgtgcgtatatcgtgtgtgtgtgtgtgtgtgtgtgtgtgtgtgtgtatctgagagggccttgatctccagaaactggagtctctctcaggtggttgtcagttgcctgacagggatgaactctgtcctctacaacagctgccagccagttctccagcccatcttcttccccttcctgagacagggtttctctgtgtagccatggctgtcctagaacttgttctatagaccaggctggccttgaactcagagacccacctgcctctgcctcccaagtgctgggataacccagctccatcttgtttttttgtttttttttgtttttttttttttgagataaggtctcatatagtccaggcctcaaactttcaatgtagtccaggctggtcctgagctccggcctctgccgcccaatgtgtatcaccacacctggtatggattttttcctgatgcccagcacttggagacccacaagttcaaatcatcctcagctacatgagctcctcgtctccacacaaacaagagtatgagaggctggagagatgctcaacagtcagcagcactgacctctgtgggcaccaggcatgcccacagacatgatgtgatacagacacatctaacacaggacacagcattaaaggacacagcagaagaggacgagaaaggatacaaggctgagggctcacagagactatcttgtacctggcgtctgcaggctgaggtgggaaggcccaggctcttggggaagagtgcatggaaagacttgcgtaggctcatcttccaaactctggacagctgcacaagaaaagacggctggagcacagctcctcccagaatgcctgtgccccatgccccatcttggccataccatctttctaggactgccaatctaatcccctggctcttactggcactcagatgacccaaacaacacaaggtcctcaccttctgagctctggccctccctgtctacaaagcactgggtagccggaaggcacacatcttcagactctgctgaggagataagagacagacagaatgacaactcaccctcagacttctacagttctctcctgactcttacagccagtttacttcaggggtcaagggcagagcagagagcagcacttaccatcacggcagtctttggcattcttggtcctgcccatttgtactcctctctcctttcctgtgggggtctgggctccctctctctgtggctgagtgggatcccccagagtagctgtaggcaccaccactggctctaccagtgtagcaggtgacctgccttggacccccacctcaagcatgctcgcctgctcacaaacagttgcagcccactctgtcccagcatcttctactcctggctgcttgctttgtcttacatctgccgctgctgaagatgagccttcctccacagctgtttcccaggcctcctcaggaggcaggacttccttccctgcttgtgcactactgtcttctactgtggcagaggaggcctggtttccctctagctgaccaccaggggagcccatatccacaccctggtctacatcatcactggctctatggggagcttggctctctgaatgtgggacagtaagagcctcatctgtgtccatggggctgtcagggaccacttctctcttttcctcctccacgtctgtgtcactgtctttcccagaggcactctggcttcgttctacgaggacctgtggttgggacttgacctcttccatgcctggctccctgctccacagagccatccccctgtctttcagatgggccaaggtgactgctgctgagactccatcttcctcatctgtgtcgctgctgatcaccatggccgtgtggtttctctctggagggccagccactggagtcttgccttcttccacacctgtgccacgaccagctgggctgtcctgcagatgggtcacgacaggtgctccagggtcctttttaccaactccaagcaggacttgcttcttccccggaactacagggggggtcacagggatcctgtcttcttccacgtctgtatcgctgtccacaaagccggaaggctggtgttcttcacccatttccgtgttgctgtccttacccacagtggagcccctcccaaccacagccgctccattgccagcctcactcttgacttttgcatctctgagcttttgctcagcaggctgagccagtaccagctggataccagatgtcactccattagcttccagctgcttggcctctgcagcagcaccatccctggcaactgaagaggactccccaactgctggctgtggacatagctcttcatctgtgtcactgcccaagtcaaagggcaaagacggcccacggacactttgggctggagaagacccctcttcatcactgcaaagacagagagcccacagaatgtactccctggataggccaccccactccgctgtgagggccctgagagtgagcaggcactgctgccaggtgtcttcccatccccactgagcacaccacaagtactcttcataatttaattcagctgaggaagtaattatgcctaggctctcggctccacctgtcaagataatcacctcatttattcaagaccgactctttattcaaaggccgaggtgtctaaaaccagttaaggaagctcaaccctatcgtcccaatcctgatactgaacccagaggtctgccaggagtctaagaccagcttgggctacagagactgtttaaaaacaaaacaaaacaaaagatccaggcatctggtactttgctactcacctttctggtactactgttgctgatggagacgttggattccttgatccatttgccacataccttccagaaggaaaatctggcaagaacaggaagaaataaattgacagtttacaccctcattcctgtctcttcacacacatacacccaaggcacaaacttacctacttcctcctccgaatcctcagccaacaaaactctggaggtttgggaccctccctgtattctgggggtcttctctatagttagaagtccccgagagaccaaaggtggagggacatccaagcgacggtactggcagggaaagtctgcaaacagaattaattcctggtccttcagacgatggctcactccaggggttaggacctttgggggctttaccagttgagtgccattgaggctcccacaatcctggaggataggggctttgttgcaagctgagatttcaattactgcatgctgtttagagatggatggaaaaggcagggccacagagcagtcggggcttcggccaattacattcttgccaaggtagagtgggaaatctaaggatcaagaagaaacattaagttgggcgttggtggcacacacctttaatcccagccctcgggaggcagaggcaggtggatctatgtgagttcgagnnnnnnnnnnnnnnnnnnnnnnnnnnnnnnnnnnnnnnnnnnnnnnnnnnnnnnnnnnattaaaaaaaaaaaaaaaaaaaaaaaaaaaaagaagaagaaacattaaagagtaagggcagagtcctggcctgaatgaagatggtacctactgctcactcaaagctctcacagggttaagaacaatgggcacaccagcgtagaagagcattcacaatacatcactttgctgtaatattctatctactcacctcatcggtattgttccaacagatccgaaaacagtttcatgcatgctagctaagcactctnnnnnnnnnnnnnnnnnnctttccctgagctactgcccttgctttgtttttgatccagggtctcactatgtaacccagattgttttcggacttgctatgtggcctaggttatcctcaacctcacctcctgagtacagggatcacagacatgcaccaccatgcccaaagggagtttcttattgtaataaaatacacaatataggctgggcatattagcacatgactttagttctagcatttgaaaggcagaggcaggtaggtttctgtgagtttgaggccagtctgcatagtgagttccaggacagcaagggctacatatatactctgtctcgaagaaaaacaatacacacaatataaatctaaccatcgcaatcattgtaagtatactgctcagttgtgttacatatccatttctaggccacaatgtattttaccttttaaaaattttatgccctttagtgatggcacacacctttaatcccagcactcaggaggaggcagtggcaggcagatcgctctgagttctaggacagtctgagctagacagagaaaccctgtctcaaaataaataaattttttatttactcattatttatgtatatgtgtgcacctgcatgagtttatgtccaccatatatgttcaggtacccaaggtcagaagagagcatcagatcccctggaaccagagctacaggtggttttgaccaccatgtgggtgctgcaaacctaaaccaggtcctcttcaagagcagtaagcactcttagtccctgaaccatctcttcagctcccacattctatttttattcggagctcttcattttctcctaacaaaagaaaaacactcccagaaagtacagggtacccgcctggaacagtcaactcaggtggcctctttgtcatccctagtacaacaattattatcctcttagaaacatacataaggtttaccaatgatccaactgcctctaaggagaagacaagacccaatactcattcagctcccaatatctcctgacctctttctggtccatgagtactactgaagagacgcagctgccctataggctccaagctataccccaaggacccactgggtatttctgtctcctcctcctcttcagcatcccagtcaataacctgggtgttttccatgacctgtgagggaaacacattatcattgttctggtcattggtttacacacacttgtagagaaaaaataacgagataaccctggaggaacgtggagtgacgtgggggtgattcctgcctgcctttccttccttccttccttctttcttcccagacagggtttctctgctgtcctggaactcactctgtagacaaggctggcctcaaattgacagagatccacctgtgtctgcctcttgagtgctgggattaaaggtgtgcgccaccatgaggtgatgcttttctgtcattctgaagcatgtaaaaatattggggtggggcatggatagtaagaatgtcagtgacagaatgtttggctagcctatgtgaggccatatgttcaacacttagtactatcaatgggaaaaaaacaacttttttgggggccagccagtggtgacacacacctttaaccccagcatttgggaggcagagagaggcagatctctgagttcaaggccagcctgttctacatagtgagttccagggcagccagggctacacagagaaaccctgtctaaaaacaacacacacacacacacacacacacaaaacttttgattaaaagatgttggcatatatctgtaactccagcacctgaaatcccaaggcaggaatattaagagttggagacctggccaggcatggtgggtgacacacgcctttgattatagcacttgggaggcaggagtcagttcaaggccagcctggtgtatgtagtctgttccaagccagccagagctactagttagaccctgtctcaaaagagtggggtatagaaaccacccttggttacagtaagaccttgctccccaaaacaaaacaaaaatattatgtatgtgtatatttatacttttggtcatgacaaagaattaaggtccaagtataccattatatatacattatatacaaaggaatgttacatgggattttaggtactggaaactaaacctagggctcacacatggcaaatgctctaccactgagctatatctccagccccaaaatgggtacttttatttaaagtatataaaagcatgataaactggatcgaggtagtgtatgtccacagttccagctgctgaaggaagctgaagcagtgcaattgcttgagtccaggagttccaggtaagctgggacaacatattaggacctctttataaaaaataataataaaattgcctggccttggtggtgcatgcctttaatcccagcactcaggaggcagaggcaggcggatcgctgagtttgagaccagtctggtctccagagtgagtaccaggatagactccaatgctacacagagaaaccctgtctagaaaaacaaaataataataataataataataatataataaataataataataataaatagcaagttcaagttaagcggttaaagggacggctcagtggttaagataactgccatgttcttcaagaggttcagttcccagaaccctcacagcagttcataactccagttccagaggatctgacaccttccttagaaccaggcctggcccgtgtgtaggcacgggttgctgagaaactgctacatgaaatatactgtcttctaacctctgacacacagatctcagagagctactgaggatcaaactcagggccttgtgcaaactccaggttttgatgttctttttagacagggttcctctgtgtaacagctctggctgtcccggaactcactctgtggatcaggctggcctcgaactcacagagatccacctgtctctgtctcttgagtgctgagattaaaggcatgcgccagcaccacccgggccaaactatttttaatactttgtctaattcatttattcttccgaaaaaccctgtaggtataaactattcttttctttttaggcggagaaactacaacatagatgggctccaagtcaaacttgcctaatgtaactccctggcaagacgctttttttcccctacactccagatggtagcgggggagccgcctctgcatctccccacacccacaaccacgtccgtctcattgacttgacaatgaggaagcgcacctggcacctcaaccaaaataaaccctgctctctctctctctctctctctctctctctctctctctctctnnnnnnnnnnnnnnnnnnnnnnnnnnnnnnnnnnnnnnnnnnnnnnnnnnnnnnnnnnnnnnnnnnnnnnnnnnnnnnnnnnnnnnnnnnnnnnnnnnnnnnnnnnnnnnnnnnnnagcaagcgccgctaacaggcaaagggggtgtggcctgagacgccggctccctgattggctagcaccctggacccacccacccatccaccctccgtcgctacgtcctctgccgcacacttcccgcgccgattttccaaacgccttactatagagtctcgcgccagtcgccggcagtggctagaagggccgtaccatagacgtcgttccgaggccagagcgcccttctcggtcgtcccagaaatggcgctggccggctcaacgtgtaatgaagggtttgcgggctgcagtcgtggctgcgggctgcacactgcagattggaaaggtgcccgtaggcgtggcgctccagaactccccgttgcagagggattccatttgcttctgatttggaaagcttagcaaggaatatgtgtgtgtgtgtgtgtgtgtgtgtgtaaaatgacggacattttgaggtcaccttcctaaatggaagatcctaaataaaacagacgtgggtgggcaaaactgttttactaaaacctcaaaatatctgtcatctttcaaaagatgggaatgagataaagaaaattattatcgtcacaaaacatgaaagcgtagcaaggaaatgggcttggatagtttttaagttctctcccatcggttatctcgttgtgttcacaataaacaaattggcagacgtttgtttgaagctgtaagttggattccttccccatgttcctactgctaacgggacaaattcaagtaacacaaaattgatctctttccttattatcatgacccaaattaattgtgtttttaatgaatgaaggggtattaatgctatttaatgttcctttatttaaaaggtaacttgagctgtgtatggactgaatgtcagcaatgtctttgatacattttctctctgacaaagggtctcactatgtacctctggctggcctagaccaggttagcagtgaactcattgatcctcctgcctgtctgtccacacctctccttcacgacctgatactgcttaccacaccccttcctttgttttctctttcttgaggaggtatttactcatgtgtattagaattttgtctggatgtctgtctctgcactatctgagtgccacatgcctgccgagggcggaagggggtgccgggctccctggaacaggacttacccatagtggaaagccttaaatagtgatgggaatcgaacctggctctttttccgaggacaaatgctcttaattgccgagtcatctctccagccccgtgtgtggtttgttttcaagacaggctctcactttgtagaccaggttagccttcagcgtacaagaatccttctgcctcaaccatcctactgtgtgggaggttggacacaaactaattttccactcatttatttattatttatttattctgaaactgggtctaaagctgtacctcgggctgtacaggaactctcttaagtagcccaattgaccttgtacttcctgagatcttcctgccttggagttacaaagcaggtgttaaccgtgtgaaccacccctgctgactcttagaatcattttgtatccctcttacactttcaggatactcagtttctatcaaatgaaaccctgggaaaagcttctgggctctgactcccatttctcagttcctggactctgccacagcctcccgtaacgaatagaaccaaccaactgaaaacgaccacttggcttccttcacccaagtgtcttgagaagcatcccatttcatcgtctgtattgataggacgaccatggtgtcttcagcgtggtcccaaaggcccaaccccaccccacccccgccgccgaggtttacagctttctctctctctctgaacatcggtcccaagcaacacttctagtctgaaaaatccttgcaattttgtttctctctcgaaacatccttgggacaactcccttaggagccggagggccatcctttcttctggagggatgcgagggagtgctgctcactgaagttactgtcttgggaccacaaagaactagatagtaagatcagggcagggtgccacatttctccggactttccgctgagctatgcagtccgcctttaccagagccactgcggtgggcagcttgcagggcgcgcccatcccatctccaattcagggcacctcagacatcccaattaccgttaagtcccaaaacttcttagagcacaaaaacctctctcaggaacagaggataggaatctcgtgcgaggtcactttccattaaaaataaatacaatcacacccacacgaaaggtacccactaaacctcccacagtatccacccatgcctaacttcatattgcagcgtggacaatagagaactacaactcccaaaaaggactgcgctcgccactggctcacagaccaatggtcggctggcacgtgatcggcggatctaatcagcggcaggctggagaggctttgtcttctaccaggggctcccgcctatctcccgcccccggctgcgcgaacgcgcgccccgccctgcgcgccttccctcctgcgctcgccggcctcttctgcctcttagaaccttcctgcggtcgtgctcgcatctctctgctgcagcctccggagccacgttccatcccttcagcctgagaccagccaagaaaaaaaaaaaaaaaaaaaaaaaaacaannnnnnnnnnnnnnnnnnnaaaaaaaaaaaaaccaattatcttttcttgctcggtacctaccttgaagccagcacaaatttattacagtaaaccgtagccatgagggaaatcgtgcacatccaggccggccaatgtggcaaccagatcggtgctaaggtaagaatttttaaattggtaccggatacgcgtgaggatgagaaatccaggttaatcatgattaatgttaccgggtgttagcattctccctccgccggctttggcccctcaaagttctgcgcgaacaattataacccatatttgtagcttgcgttctgagaaatatttatcttggcacattttccgaaagccattaaaagagacgcctgggtttaggggacggagagtctgaggagggactggagtgcttatctaaaagaggggatttctaacggttcgagaacgggagaggagagatgcggaaacgatccgagacaaagccgaagcgaggttttccccttgcgccacccccacccagcctggagggccttagcggagcaggactggcgggggcaggggagaggttgggcgggcagctgcagaggtctccgggccgcatcaccgctcgacaaaggcttggagaccctcgcgatctcgccatcccctggctcgcttttaggtggatggtgatgattccgtgcggggggctccttttacttcattgccgttaagaaatcttagggtgtgacctgatgggaaagtgagaggtttgtgtgtctataagaggtccctcgggactatgtgtgtgtttgggggaaagctatttagggaagagaaggtagcaaaagcaaaaaaaaaaaaatctgaggccatggttttctcttttttttttgcgcgcaattacaatgtagcgggggatgggtggagaggaggaagtgcggccgctagattgtagccgaagggtgggaccctttgggggcggggctattcttggctggaagagcgccccgccaccgcagtcacgtggaacgcgtaaggggtgggcgactgcagtggccgcaccttcctaccccatccctcttttgtgctggcctggaggggcggtgcccaccctgaagcgcttggctgggtgctgagccgagggggcggatggcagttcagtcagcccatatgggtgcttgcaaccctcagccccttgaactgtccatcacttgaccagggccacaaaggtggcgaccttccccggttggaggttcggtcgtggaggctcggcaggcagataacggaattgcagtatcaacccgtccgcctcgtttgagcacgtctagagttgaaatgcgggcggggaggcatcccttaggacttcagccattgaggcctggctcattgctcattgctctgtctagttctgggaggtgatcagcgatgaacacggcatcgaccccaccggcacctaccatggagacagcgacctgcagctggaccgaatctctgtgtactacaatgaagccacaggtgagggagggaatccagcttcttttttctctgttaacacttatccctggtctttttaaaccctgcgcccttctgttgagacagggtctcgttatgcagccatggctgccctggaacttacctccctaatgctgcttttaaaggcggccgcaccacgccctgttttcccacgttaagtgcctgttaacccggttgctggggtctcacccttttccattagacacccaccataagtgggccaaagattagctctgctgccgccgggtggcagtgcctggaatggcagtttagtggtttgtggtatttcccaccccagatttcatcctcgctgcagagggctctgacagttctacttgaatccctgtaggtggcaagtatgtccctcgggccatattggtggatctagaacccgggaccatggactccgttcgatcaggtccttttggccagatcttcagaccagacaactttgttttcggtgagttacatggaatgaattcctttgtacccaagggcatgattccagaggtgaaaggtgaagattagtaatgataatgacgtaatttttttcccttctcaccacattccaggtcagtctggggcaggcaacaactgggctaagggtcactacacggagggagctgagctggttgactctgtcctggacgtggtgcggaaggaggcagagagctgtgactgcctgcagggcttccagctgacccactcgctgggtggaggtaccggttctggtatgggcaccctgctcatcagcaagatccgagaagaatatcccgaccgaatcatgaataccttcagtgtggtaccctcacccaaagtgtctgacaccgtggtggagccctacaatgccaccctgtctgtccatcagctggtggagaacaccgacgagacctactgcatcgacaacgaggccctgtacgacatctgcttccgcactctcaagctcaccacgccgacctatggggacctcaaccacctcgtctcggccaccatgagcggggtcaccacctgcctccgcttcccaggccagctcaatgccgacctccgcaagttggcggtcaacatggtccccttcccacgtctccacttcttcatgcctggctttgcccctctcaccagccgtgggagccagcagtatcgggccctcactgtgcctgaactcacccagcaggtcttcgatgccaagaatatgatggcagcctgtgacccccgccacggccgatacctcaccgtggctgccgtcttccgtgggcggatgtccatgaaggaggtggacgagcagatgctgaacgtgcagaacaagaacagcagctactttgtagagtggatccccaacaacgtcaagaccgccgtctgcgacatcccaccacgcggcctcaagatggccgtcaccttcattggcaacagcacggccatccaggagctcttcaagcgcatctccgagcagttcacggccatgttccgccggaaggccttcctgcactggtacaccggcgagggcatggacgagatggagttcactgaagccgagagcaacatgaacgacctcgtctccgagtaccagcagtaccaggatgccaccgcggaagaggaagaggatttcggggaggaggcagaagaagaggcctaagccagagagagagagccctgcgtcttctcctcaggctacttagttccctcagctttcttcagctgcccgtttttctccttcagagttttcttttctgctgcctctgtcctgtttttttatttttttccatgggggggtaaacagtgcctggcacatagtaggcgctcaataaatatttgtttgtggaatgtttcctttctctttccactctgacaaacctagatttctgccattctgagtgttgccctgtgtttccttctggtacccatttctcaactgtcagttaatatatttccaatatgttctccaggaacctgcccattactaaaaacccaggtgtagtggtcaccatcctaaagctaagtgggtcagagaaaggtcactagaagagggatggggttttccatcgaggccatttacacagggggatccactgtggctttgtgttttttttttttttttttttttttttttttttctcgacaggtctccccgtccctgcttcatctctcagcctcaggagaggtattaacagtattatctccatttatagcctcccagctgttctgagccaaatctgctattggaggtgtctttcctgagttgttcctttctccatgggttgggggcagagccttagtctcacaaactgccccatccacttaaacctccaaatttggaaaagagtgctgccacctgggtgttaggggccttccccagagggagggcgacttttgcttctgccattttcttcctggtttggtcctaccctacctacccttctattttgtgtttgaacttggctgctttttttcatattgaaaagatgacattgcccccaagagacaaaaataaatgggaattggaaaaaaggtgtgaggtgtgctcattcagggcaggtaaagtggtagaggcatggggcccaggtggagttacacccaagctcatgaggatgtcacaagacctcatcctgaaattctgggtaagcaagtatcctattacccctggtcggtcataccttcattttgactttttatggtgttggggattgagcattgcactgtgcgctaggcactcttccactgagctgcacccctgagttggtcctgcctctgagactgtgtggtttgcccagcaggtttttgcttcattcttgaggtgtgaggtggcccctagctcccattttcaacatagtagatacctccggagcccccaccacacccgagggtttctttagccttggcaatcctggaattcattctgtagaccaggctggccttgaactcaggcagggatgcacctgcctgaacctgccaagtgctgggattagaagtgtgcaccaccattacgtggcttaacctgtgattcttttggctctagttcgtgagctctcagggcctcaggctccttgagttggtctcttgtgttctctgttgacactacagattggagttaccacatgtgcagttgcatcagctttatgatgggtttaatgtataaaaacagtgtttggggcttatgtatgactgctacaccatcttggtatcccaagctgtcagcttgactgcaggagccacgcccagtatgcccacttctggatgaaacttgtgattcttctgctcctgcttatggcatgtcacaaacttcatctcttggtttatttatttaactagggccaccttttggccttggtgaggaggaagtctagataacaggttcacacagtctaatttaatcaggaaattaaatagtcgggatgggatcatcagaatctggtgtaggggtgagaagggagcaaactgctccaaggcaaggcacagaatatttggcaaggagttacagtgtgcccctctgtccggaggcatgctcagggaggccaggagaggtgcatgcaacgagccacagggccaggtcccgccgggggttcatgctgtcctcaaaggcttgttgtggttcacctagagagagaaatgatgacatgggaactctgccctctccagcaaccgcttggaaggatgggttcaggaaggcacagaaaaggccaacaatcttctaggctaggtggcacacactcaggaggcggaggcagggggatctctgtgagtttgaggctggcctggttacagagtgagttccaggacagccagggctacacagagaaaccctatccatgtttaaaaaaaaaagcaacaaaaacacgccccctagatggggtctcactatgtggacccagatggcctcaaactcacagatcagcctgcttcggccccgtgtgctgagattaaaggtttatatcactacacccagccacactttatttatttatttatttatttatttatttatttattggtttttcaagacagggtttctctgtggctttggagcctgtcctggagctcactctgaagaccaggctggcctcaaactcacagagaccctgcctttgcctcctctgtgctgggattaaagcctgcatcaccagcgctgggcctggaggtggttcttttgtgtgtgcacttgtgtgtgaaaggcaaagaataactttggttgttcctcaagcactgttgacaattttgtttttagggtctctcactggcctagaacttgccaagcaagaacctgacctgggttctgggaattgaacttgggtcctcagcagggtgacctgggcactggcaaagcactgtctgtgacttcctgggctcctggaagcacttatccactgtatcccataacacaggtgcaccgtcccccctccccgtcccgtccccccccccagcattgaccctcacctgggagatgctgacgcccgtgagtctctccacactctctggcaggcggcttaggatgtccagtacttccccagtcactttggcggcccccatggttccacttccgctggacaccagtgtgatcttattggctgaggtcaggggaccgctgatctcttctgccacctgggaggtagagagagctctgaccatatcacccatcagattcaccctactactgaccataaactgctcaagctggtcactggcttatagttggcactcttaatttatggtcccccagtcacctacttcacctcacccctctcccagagtcccacccacccccagacctggggcagtttctctagcagcatgtccagctgggcggcctcctggtacatctggaaggcttctgccttcttagccatttgctcagcttcagcacgagcgcgggcccctatggcgaaggcctcggcttccccacgcatctgtagaggttacagggcatttaagactgcacccattaagaataagaacaccaaaacagaaggcagaggtggttcacgcctttgatcccagcagaggcagaggcagaactcacagatctctttgagttctaagccagcctggtctacagagtgagttccaggacaggctccaaagctacagagaaaccctatctccaaaaatcaaaaccaaaaccaaaccaaccccccccccaaaaaaaaaaaacccaaaacgaaattctgaggccaatgagatgcctgagatggtaaagtgcttgctggcaaggccaacaacctaagtcaaaattcccaggactcacatgtgaggaagagatccgaccttcacactggcaggatagtacatgcaccatcatgccccccacgttaaaagaaaaacaaaaacaaaaaaccgacaacaaaaaacagctggggggcagttgtacatgcctttaatcccagaatttgggaggcagaggagggaggatctccgtgagtctgaacccagcctgctgtttaaacaacaacaaacccaagcccttcccggtgccaagctgggcgcacgccccaactcaccctcacagactcagcctcggcctctgcctgcatgatcagctgggccctggggacgaaagggaagtaggttcgctgcctgccgggcgggtgcctggcctgcctaggagtgtcccggggccaggaggggggcggggagggggcgttacttttctgcctccgccaggcgctccagtctgtagcgctcagcctcggcaggcttgcgcacgcgggccagggctctgacagttctacttgaatccctgtaggtggcaagtatgttgccacctgctgggcgcgttccaccacctgcacctgcacccgctgctcctcgatctgctgcttggtcttggccacctggagagcaagggacactctagacagggcttgggagcagatgctcccccaccccggagccagagagaaaagccagcaagcactacggtgtggaagaggcccatgaagtcgcttcctggtctgctcagcctactgggtagtgggatccatttcaaggacagaatcaaggcagaacctgggagcggcctcacgactcctcagagcaggttcaggccttagcaggtacctgctctcccctgggtggggcgaagcatctcgcccaggtcttcacttgggtatttgtgtccctggtggtcatcttctacctccacagtccacttccctttgcaagccgttcttagggtaaaccaccaactccagccctgacctctcagtagccagtactgccttttctaccctgccagcggatacttttttttttctttccattttcatcttttgcataccaaataaattcaaaagaaaaagccggtatggaaaacgcggcttcctcccacctcttgcctcaaaccgcttggttcccttcctagaagcaaccgctatggccagttttcagactgtgtgtgtatgctcagatttctcttttccaccgtcaacattgttgttattattttggtttttcaagagatggtttctctgcgtcgtagccctagctatcctggaactcaatctgtagaccacattggtcttaaactcagctagcctagtgctggaattaaaagcatgtgccaccaccaatctcttaaagacacacacacacacacacacatatatatattccatctcatgaactacagttacagatggttgtgagctcccattcgggtcctgggaattaaactgaggacctttggaagaacagcagtgatctcaaccactaagccatttctacagctgttttttttttttttttttttttttttttttttttttttttttgtttttgttgtttgtttttttaacataaaatattgtccctctgtattccaggtaaccttaaaagtacatagcatggggctggagagatggctcagaggttaagagcactgactgctcttccagaggtcctgagttcaattcccagcaaccacatggtgggtcacaaccatctgtaatgagatctggtgccctcttctggtgtgcagatatacatggaagcagaatgttgtatacataataaataaataaaatctttaaaaaaaaaaagtacatagcacatatctttttttatcccagcacttggaaggaagaggcaggcagatctctgtgagtttgaggccagcctagtctacaaagctacacagacaaaccctgtcttgaaaaaaaaaaaaaaagtacatagcccaagctaggctcatgcttgatgtgatcttggattagcaagatgactttgatcctgggggaaccacgtggtaggagaggggctggctcttgcaggctgtcactcacctgaacacacataaatggaattaaataatgtggggtggtggagagacagatcggcagttaaaagcactgactgtgtttgcaaaggaccggtgttcatcacctagcatctacctggcatcttatgaccatctgtaactccagctccgggggatgtgacaccctcttctggcctccacaaataccaggcaccagcacatgaacatagtacacatacaaacacgtaggggaaacactcatcacataaaataaacacataatataaaaatgatgatgtggtggattttggagagccccctttgagggccctaccctgcctggggagtggagggtggatggggtgggggtagtaggttgggggagggtgatgggagtgaggggagagagagggagagggagaagggattgacatgtgaaaccagcttgttcctaatttgaaataataaaaataaacacataatataaaaataaataaatacatattctttcttcgtttttgtttttgtttttggagacagggttctctgtggctttggaggctgtcctggaactatcacttgtagaccaggctggtctcaaactcacagagatctgcctgcctctgcctcccgagtgttgggattaaaggtgtgctggacatggtgctgatgacatggggtagaactgtttgcagcctgagagctaaaacaaggtagccctttccttatctcatctcatctggagactccatcagacaactagagtttctcagcattctgtgtctgcccaggctttacacaaatgctgcaagttctgacctagggctcacccactaatcccagtgagcaggcagattcgccaatgtgcaacccatgactggcagggaccagctaagcctccctgtaacgtaaagggctgctcggagatcactgtccatatttcaaggcccacgtccgtttccttcctcacccttttctttgattgccacagttttggggtaccttgtgcaagcgaaaaaaaaggttctcttcttctgaataggtgcagactcttacccagaacacttcctggcagtgagcactgggtggctcttcactctggttcctctctgcagccagaggcccttacagacaggcacagcctagccaatttatggcctctctttctttccatcctcttctctctctctctctctctctctctctctctctctctctctcctttttgatttttgagacagggtttctctgacagcagctctggctgtactagaactcactctgtagaccaggttggccttgaactcacagagatccacctgcctcttcctcccaagttctgggactaatggagtgcaacaccaacacctggctcgttctttctttttttggggggggaggttttcagctaaatgctccagtctatatgcatgtgcagatcacacgcatgtacaggtgtgcaggccggaggacaatttaacactgccacgcctcttcaggcaccatctaccttaccttctgagacaaggcccctcactggcctggcattcaatgattgtgctagccctgctgaccagtgatcccccaagatccagtatggggatcacacgtgtgtgccacccagcaagtttatcaaccgagctacctctccagtctctgctccagactgttacctctttttttagattggggagatgggttagcattggggaactagagtctgagcaaagatagaagtctctcctaatttacagatggaagggagaaaggagagggaccaccgaacagcctagacaagccccgtgtggctgcacttacttacctgcagctgataggccaggtccgcctgtgctcggcgagtgttgacctcgatgtcataggtagccttcttcagctcatagtctctctgtgccttggccatctctatttcacttagacactgcgcagataccttctcctgcttggccttggcctcctaggacagattagtgagggaggccaaggcgtaagggcctgcttgctctctgccagaagtctctattgtcacccctgatgacacagtctggccaaccactcagctggaccctccaaacccccttgtgtcctggggtgtctagcaagtcagtggtgaccaaacaacacccatcgccctcacccgtatcccggcatctcttttggcctctgcttccccaatccgagcatctttttggacttgcgctgtgcgagccttccccaaagagtgcaaatagtcctgtgggagagtgagaccaaggtttgagaaatggggccaggctttttgtttgttttgtggtgcaggggttgaagcagagcccccagcacacggggctaggtgagtgaactaaacttgttctttgtttccccagacagggtctctctgttatgtagctctggctgtcttggaacttgacttatagaccagactggccttcaccaattcacagagacccacctgcctctgattcccaagtgcaggattaaaggcgtgtgctgccatcacaggctgtttgtttttgagacagagtcacactttgtagcccaggctgctctggaactggaatggaactcactttgtagcctagataacctatggatccttcttgctttagtccccccaccctatccccagtgctgggattacaccaagcctgcccaactgcatagttttacctggtcatcatgaatgtccttcaaggtgtagctaaccacactgatacccatgttgaccaggtctgaggaggccactttgaaaacttgctctgagaatttctgtctgtccttatagatctcctagagagaacagtgaggagaggtcagattcatcatctcttaccgacaagccggtcctcaggtgccactcatcctggcaccctacccagaactgttcttgtcccccagtcacacctccacagtcatatgggccatgatggccctctggtggccctccagtgtttccagggcaatgtgggcaatctccgcctcggtcttccccaggaacatctggcaggcggctgccaacatctccttgttctggccctggattttcacctgcagccatagtagagagaagaggaagagctaggtgcccttgggggtggctggagaaggtgaggccagaggaaaggcagagtcgagagaaatccctggtcagaggtactcaatggcctggaaaaggtgggtgtgggctttgggggagaaggctctgaaagcctcacctgggcaatgcccgtgactgagatggggaccccatggcgggtataaaccttttcactcttgacattgagggtcagtgtgttgagagagatcctagggagagaagaagcagcagagaggaaaataggctccctccggggttctgtgggttacctacctctggatttgttggatgcagggcaggacaaaaactcggcctccggccaccatgactggggggctcctgcagaaccctgaaaggtgagggcataatgtggccgtggtagagcccaaaagactatggggtgaagggtggaacacacaaggagaacctggtgggagttgagggcgagcattctaggccttggaaaatagaggcagggaatcacaggtggtttgtggccaccgtgggcagaaggttggggctggtaaactaagtgaggagagaacagggcagaggtcaggcttcaaggggcttggggaggggaggagcgggtgtcactggctttgaagagacttaccggagaccaccatggcctcatttgggccacaagtgaaaaacatggttgaggctgcagctggagggggatggagaggaagcctttgcagaggggaaggggccttgtggcacctcctcccccttcgcgtcaagagaaccgtctgcccctgccaccgcccagttccttaagtgctcccgtgatagccctaagatccccagggacttcttcctctgcgcctgctgattctcagggtcttctcccgcgccctccagcccctccatcccacaaagctctcccgcgcccaggggtctgcagaccgttccgcatcctccccgctcctccgccgcccaaggctccgcctcccctccccactcaccttccgggacgcggggagcaaccctacgggggtcttgggagccgcgcagagccctagtgagaagcaggggcagctcggacacccggcttactggaagctgcgagggtgccccnnnnnnnnnnnnnnnnaggccccgcccgggtccgcagcgctccagctctcggcagtcccgggggcttgccaggcttgcccgctagccccggccgggaagctccgcccccgcccccgagaccacgccctcccaggctggtcgctgggtgcccgccgtccgcggtgagtaagcaggttgccacactagcagccaactggcaaaaccgcagacccagtaatgtatgacagcatccggtgaccggatgtaggttgtaactccaagaaaaagagttcgggacccaagaagaggtgctgaccgggaactagtcacatcctcccgccgccaccatcaccatcctcaccccccctttttttggccgcgtgaaaagatacacttggacaaatgatgatagtaataaccggcaatcaagtttattcgtgttcacagaacatactaaggcgacccccaacagccgccctctgacaatccgtggacccaagactcccgcagcctctcctgagaagcaaccaggaagacatcaaaggccacagaccggatcccccaagggtgtcccgaaagccttacaacagactacagaagtgaggggctggaagacggagtgttgcccctaaacccatgaccaaccaccaagtctaatccccaccccggccctccctcccaccgctctgtctcaccgaacccataaatcattaataaataatccagatgtcagtgttacggcaagggggcatatcccgcacccctgcataagttaaaataaatattacatacaccccctccttcacctaggaggttatacataaatatataaatattaattaggacgctgagaaggcttcggtccttcccagtaggcctcgccaggacccacggtgcctgcgagctcgggctcgcctcaagcaccggcgtcttggctgtagtgttgtgagttagcatcgccttataagtcccagtttgggatacgctctggcgcaccagatacgcctggtgcctttgttgtttttttccgggccaggtgtgaccgggcgcattcagaaggccgcggggtgttgctgaaggaaagctttgaggtccagagcatagtccgaggactccgaggtcagattcaagggctcgaggaccgggggctcagtcatgagcgcagagagggtttcaggtgtcgcggcgctggtggcgtcctccggagccagggtctgcgacacaccttcctcggccatcaagatctggcagaagacgatggtgagcaggagaaagaggaccctcttggcaacgttgggttcctcggttggcagctggcgccggacctgggaagagataaaagagggttaagtcggatcagggtccccgccgtctggtgtcccccgtaggtacccgagcggcgcgagcccctgctgcccactccggcgacactcaccactcgagggtagagaacccttcggctgcgttttcggtgcccgcgggaagtgtggagacgcgcggcaggcgccaccgcccgctccgggagagggtcgaaggtgaaaatctcgggaccggagccccgccggagttccgagccggtggagggagcgggggccggggctggcaggnnnnnnnnnnnnnnnnnnnnnnnnnnnnnnnnnnnnnnnnnnnnnnnnnnnnnnnnnnnnnnnnnnnnnnnnnnnnnnnnnnnnnnnnnnnnnnnnnnnnnnnnnnnnnnnnnnnnnnnnnnnnnnnnnnnnnnnnnnnnnnnnnnnnnnnnnnnnnnnnnnnnnnnnnnnnnnnnnnnnnnnnnnnnnnnnnnnnnnnnnnnnnnnnnnnnnnnnnnnnnnnnnnnnnnnnnnnnnnnnnnnnnnnnnnnnnnnnnnnnnnnnnnnnnnnnnnnnnnnnnnnnnnnnnnnnnnnnnnnnnnnnnnnnnnnnnnnnnnnnnnnnnnnnnnnnnnnnnnnnnnnnnnnnnnnnnnnnnnnnnnnnnnnnnnnnnnnnnnnnnnnnnnnnnnnnnnnnnnnnnnnnnnnnnnnnnnnnnnnnnnnnnnnnnnnnnnnnnnnnnnnnnnnnnnnnnnnnnnnnnnnnnnnnnnnnnnnnnnnnnnnnnnnnnnnnnnnnnnnnnnnnnnnnnnnnnnnnnnnnnnnnnnnnnnnnnnnnnnnnnnnnnnnnnnnnnnnnnnnnnnnnnnnnnnnnnnnnnnnnnnnnnnnnnnnnnnnnnnnnnnnnnnnnnnnnnnnnnnnnnnnnnnnnnnnnnnnnnnnnnnnnnnnnnnnnnnnnnnnnnnnnnnnnnnnnnnnnnnnnnnnnnnnnnnnnnnnnnnnnnnnnnnnnnnnnnnnnnnnnnnnnnnnnnnnnnnnnnnnnnnnnnnnnnnnnnnnnnnnnnnnnnnnnnnnnnnnnnnnnnnnnnnnnnnnnnnnnnnnnnnnnnnnnnnnnnnnnnnnnnnnnnnnnnnnnnnnnnnnnnnnnnnnnnnnnnnnnnnnnnnnnnnnnnnnnnnnnnnnnnnnnnnnnnnnnnnnnnnnnnnnnnnnnnnnnnnnnnnnnnnnnnnnnnnnnnnnnnnnnnnnnnnnnnnnnnnnnnnnnnnnnnnnnnnnnnnnnnnnnnnnnnnnnnnnnnnnnnnnnnnnnnnnnnnnnnnnnnnnnnnnnnnnnnnnnnnnnnnnnnnnnnnnnnnnnnnnnnnnnnnnnnnnnnnnnnnnnnnnnnnnnnnnnnnnnnnnnnnnnnnnnnnnnnnnnnnnnnnnnnnnnnnnnnnnnnnnnnnnnnnnnnnnnnnnnnnnnnnnnnnnnnnnnnnnnnnnnnnnnnnnnnnnnnnnnnnnnnnnnnnnnnnnnnnnnnnnnnnnnnnnnnnnnnnnnnnnnnnnnnnnnnnnnnnnnnnnnnnnnnnnnnnnnnnnnnnnnnnnnnnnnnnnnnnnnnnnnnnnnnnnnnnnnnnnnnnnnnnnnnnnnnnnnnnnnnnnnnnnnnnnnnnnnnnnnnnnnnnnnnnnnnnnnnnnnnnnnnnnnnnnnnnnnnnnnnnnnnnnnnnnnnnnnnnnnnnnnnnnnnnnnnnnnnnnnnnnnnnnnnnnnnnnnnnnnnnnnnnnnnnnnnnnnnnnnnnnnnnnnnnnnnnnnnnnnnnnnnnnnnnnnnnnnnnnnnnnnnnnnnnnnnnnnnnnnnnnnnnnnnnnnnnnnnnnnnnnnnnnnnnnnnnnnnnnnnnnnnnnnnnnnnnnnnnnnnnnnnnnnnnnnnnnnnnnnnnnnnnnnnnnnnnnnnnnnnnnnnnnnnnnnnnnnnnnnnnnnnnnnnnnnnnnnnnnnnnnnnnnnnnnnnnnnnnnnnnnnnnnnnnnnnnnnnnnnnnnnnnnnnnnnnnnnnnnnnnnnnnnnnnnnnnnnnnnnnnnnnnnnnnnnnnnnnnnnnnnnnnnnnnnnnnnnnnnnnnnnnnnnnnnnnnnnnnnnnnnnnnnnnnnnnnnnnnnnnnnnnnnnnnnnnnnnnnnnnnnnnnnnnnnnnnnnnnnnnnnnnnnnnnnnnnnnnnnnnnnnnnnnnnnnnnnnnnnnnnnnnnnnnnnnnnnnnnnnnnnnnnnnnnnnnnnnnnnnnnnnnnnnnnnnnnnnnnnnnnnnnnnnnnnnnnnnnnnnnnnnnnnnnnnnnnnnnnnnnnnnnnnnnnnnnnnnnnnnnnnnnnnnnnnnnnnnnnnnnnnnnnnnnnnnnnnnnnnnnnnnnnnnnnnnnnnnnnnnnnnnnnnnnnnnnnnnnnnnnnnnnnnnnnnnnnnnnnnnnnnnnnnnnnnnnnnnnnnnnnnnnnnnnnnnnnnnnnnnnnnnnnnnnnnnnnnnnnnnnnnnnnnnnnnnnnnnnnnnnnnnnnnnnnnnnnnnnnnnnnnnnnnnnnnnnnnnnnnnnnnnnnnnnnnnnnnnnnnnnnnnnnnnnnnnnnnnnnnnnnnnnnnnnnnnnnnnnnnnnnnnnnnnnnnnnnnnnnnnnnnnnnnnnnnnnnnnnnnnnnnnnnnnnnnnnnnnnnnnnnnnnnnnnnnnnnnnnnnnnnnnnnnnnnnnnnnnnnnnnnnnnnnnnnnnnnnnnnnnnnnnnnnnnnnnnnnnnnnnnnnnnnnnnnnnnnnnnnnnnnnnnnnnnnnnnnnnnnnngacgcgcggcaggcgccaccgcccgctccgggagaggggcgaaggggaaaatctcgggaccggagccccgccggagttccgagccggtggagggagcgggggccggggctggcaggccagtcatggtgtggacgtggttgcgcgagtggcacatagtttgagcgcagtgcagagagggtgaggagcgttgctgatggcccagcgaggcggcgctagttatatagtcaaagcagaggacggcccgcggaactccgcccttcgcagctggggagcagttggctgcaaagggctggaaattccgaggaggaaacaaaacgtaggcggggccttggctgcctaatccctagatgtcccagtgcacgttttgcctgggagtagtaatgccggtgggtgcaatcgctgggggttagcacatgtccggacatgaggtggctagcggggggctcccagacatgtaacacatggctcagccaccatcctgagagaggcccagcaagatcaagggaccgcagaaaaacacattcgcatacttggaagtatgcgtagaaaacacacgtgtcagaagggaagtcattgcacaaacttccaagaagactaagaccacactgaaacccactgacccagctctgcttgcctcagcacacatgaagatgaacacacacatcacatgtatttcacatacacacacagcaaggtgcaatggccacctaggggcaccccaagcgaagctatgcgaagagggatacagcagagacaagaagtcagtagcccctgttggatgggactataagagcgagttccaggacagcttccaaacccacagagaaatcctgccttgaaaaacaaaaacaaaaagaaacaaaaaaagaagtaaaaagaagaaccttctaaaattatgagacattttatcaccattcagaaccgacaggaattctgcgctgctttggagacctctctctcttcctggacatagacatcaatgtttctgagcacctgtaacaaagtaaaagtgtgggagccaccctgcacaatatgaaactgcagccctctccctatgcttgccaagctgaggcaggaggatgtcctgaaccaaggagtttggggtcagacaagggaacatagcaagatacacttgcaaagcaaaaacagacaaaaaaaacaaaaaaacaaaaaaaacaaagaaggaactggagagatggctcggttgttaagatcacttgtcacttttacagaggacctaggatcaatcagttcccagaactcaaatgattgctcacaagtaggctcaggggatctgatgccattttatggtctctgtggggcaccaggcatgcatggagtacacatacatgcatgcagacaaaacactcataaaataaaagtgaagcgtatcataaaataaaaccaaaccaaaaaagccaggtgagatggctaagggggtaaaggcgtttgttgctaagtctgatgacccggatttgatccctggatccacttggtagaagagaaccgattcttagaaagtctccttctgacttccacatgtggtctgcatataaccacacatacacacatcggaataagtaaccaaattatatacaaatacatatgcactgttgaacgctctgaggttaggtttataggagggaagcaaaccacatagagctgtgactttggtctggaaggtttaatcccctgagtttacaaggggaccccgattagaacccttctgaggggaccctgaggagtcagtgttcgttcacttctgactaatctttcagggacacttcagtcaagagtgacactaggtgagatatgacacattctgatgtgaagggtgactgggggaaaaatggagtcagcagaggctcagagctggaaaagtacaggattcctttggagggatcacaaggaaagcaatgtcacagtaagtttcccgggaagcacaaaaggcgggtgaggaactgggcagagagagccccagatcacagagcacacaggataattgcaatctaacctgagaactgactgggatggggaccatgccctcaagggcaagaatatgagggaccatgagctactgagggggttagggagaaggtaacagcagcctaaaataagtccagaagagtcaggcggtggaggcacacgcctttaatcccagtactcgggaggcagagacaggtggatctctgtgagttcgagaccagcctggtctacaagagctagttccaggacaggctccaaagccacagagaaatcctgtcttgaaaaaccaagaaaaaaaaaagaccagaagagacatccctagcacgagatcatcagatttgggtaaggacacttaggggccttaaaacagaatggctccagaggcctgaggtgtacttggctcagaactttatctcatcttgagcctgttgagtattcgagacttccatcattcagccagaacctgtgggacacgcacctggtcctgcatagaacccagcacagtttcttgcaggaagcacttgctcaatgatcctttaaaaaacatatatatccgaatgtatgtttgtgcaatccacacatgtaagagccaaaagagccagaagaggggtgctggaacgcctggaactgcagtcacgggtggttataggctgcctgttatgggtgccaggaactacatccttctgaaagagcaataaacggaacctcccctctagcccctcaataattttattaagcaaagatgaaaatatggaactataatattctccagctggttagggcctccaagcttctgggacatgaatacacttctttaaacttcccagagaaacaatatcttagaaaaagctgggcagctggagagatggctaagggagtttctgttcttgccaggacctggctttgaccagcatccacatggtggctcatagccatctctaatagtgtcttttgatctcctttggagccagatatgcgtatgggtgcacagacatccacgaaggccaaacacacacatacaataaaaatgaataatttttttgtttttttgttttttttttgtttttcgaggcagggtttctctgtggctttgggggctgtcctggaactagctcttgtagaccaggctggtctcaaactcacagagatccacatgcctctgcctctggagtgctgggattaaaggtgtgaaccaccaatgcccgtcttaattgaaaaaattttttaaaaagaaaagctggaacttttttttaaactaacaaaactgggaacagaaaatggggcctcctgtgtttatctgtttgtttgtttatttggtttttcaagacagagtttctctgcgtaggcctggctgtccagatctcactctgtagatcaggctggccttaaactcacagagatccacctgcctctgtcttctgagtgctgggattaaagccagacaccacggttgcctctggctcaacctggaagttttaaaaattattactaagtttatctgggggcagggggtgtgggtcaaaggacaactctcgggagtcagttctgtcccttccttccaccacatagtctccttggtttgaactcaggttgtcaggcttaacagcaagccccctttcctactgagccatcttgtcagccctagaacagcttttagacaccagacatcaaacaaagatgggcagtttttttttttttttcaaccaaggatgctcagtaaagcaaatcagcctcacacttgtgctaggaatagaggtctcactgctgtgtatacgactatttcctgggctggtgagcaccacctaaacacagcttcctccttacacacacacctcttcttgtaggcataaacaaatgtcctctttctcatatctgccagcattcccatgtttgcacctgagctgaggctatttcacactcttcctcccaacctaactcacacatgggggaggacggtgctgaggatggaaggaaactggtgggagagaggggaggcccccaaagttgggaatgcataacttgtttgtgatggaaaatttcctcaggccttcagggaaaataaaagagagacctcaggttcaggtttcaacactaagccccacatctgggatcctagctgcagctgggcctagttagcctcattgtcctcctccccacacagggacgaagagatgacccagagaacccagattgttgccattttttttttctcattctcaccccattttccaccatctctggagacacagccacccannnnnnnnnnnnnnnnnnnnnnnnnnnnnnnnnnnnnnnnnnnnnnnggggtgtgggagtgggggctgggtgatgagttacagccaggaagtaccagaggttgcgagcatgagctggatcagagcccagtgttctcatcccagagaaacaggcccggagctgctccaaccccccatccacattccccctctcccggatccgcctgttccttcatttccttcctctgaccaggtattgtgacgcctaccatcacctctttctcagcctcttgtttgtctacttcatagtagctggaaaaatcatagtttcgtgtattttttttttaacctttttagtaatttcttttggtgctggaggttgaacccagaaccacttgaacgcttaccacgtgctctttctccgacctacacaccaaggctgggtctaatctaatcttcagaggagtgtacatgtcccatctgctctttacctctgggggacctctaggtatcctcggtaggtggtctggtgcctggttggggttcaatacaaagttttagctttgaaaaaaaaaaaaaccctaaaaaagtgaaaaacttgttttgtgtgtatggatgttgtgtgtgtatggacgttttgcctgtatgtatgtctgtacactgaaagacccctgccccttagccctttctttctcgtttgtctcctcttcctcctgtcggcgggttccccgatccccccccccggcggcttccacttccccctggttcattcctaggtgtttagttctttttgatgtcactgtaaatgggattcctcaaattttcttttttgaatagttcattgttactgcatggaagcacaactggtttttgtgtttcaatttttttttgtgcagtcagtgccctcggaggcagtaaagagggttggatccactggggttagaattacagaaggctgtgagctgctgtggctctaacgaggatcttaggaagagcagctagtgctcttacccgtggagccattgttccagcccctcaatacatagctttagatctatctcttccaaggagctaacggtcatcccagtgtttgtgtttgcccagctctatcccctcagagccttgcctgcgcttcctcttcaaagtgtggagaatgctaagctgtggcccaggtttattgacacacacccccctctgcagacgaggaagcccctgccttctcctcctcctcctaggactaggccagggctgctgtccacctgcagtgctacaatgttgctaacggaaagccaagggcctggggaatgggggctgcagactgacttaggaagggcagatatttgaaaagtgcatgcctctgagatagagaagcaggatggaagggcgcagccagaagttggggggctgagaacaacaaccaaagtctcctagctgcaaggcatgtgagtatgtcgctggctgagacaagtttgaggtggaaaccaagggaggcaaagggaacatattataaactagtggcattgaggaaatcccgcttaatgtccatttctgttatttattagccatacgacactgagtcagttactctttgaaagcccgtttcctcaattggcaagtgggctggctggcctttaagttattcagagattaaatgctcaggcatttaatcatgtaatcatcaagttacaagacaataaacacctgctttcgctcacattcgcaatctagatcataaaacaaaaagcaacgaaaggagaaacagggaatttgtggagagaatgagaggcagtgagaagacaaccctccaggttcggggtgggttggctctgagcaaagcatacggttgatacaatgccataatgaaacaaaacccttcatttcaacaatgaatgaacacggacttaaaaataaccaaggggctggctcagtggttaagtgcgtttgctgctcctccgggggggctccagcactcacaacagcctacatatccagctccagtcaagcttctgaccttcgagcacaccagcactcatgtgcaaacacaccctcatccccacacatacagacacatgattaaaataaaataaatctcaggaaaaaaaatgagtgtgctgacacatgccttttaattgtcaggtgctctctgtgagtttggaaccaccagcctgttcacatagcaaattcctggacagccgggactacatagagagacccagacgcaaaagcaaaaactaaaattaaataaaaaggacagaggaaggaggagagtgaccctctacctcctcccactcaaagaaagagccaaaaagtagtaaataaacaaatagatgcctaagacaggttcctggcctgcagtccatacttgggcagcagccattattgttgagtctggatgcaggaggttctctggagcacnnnnnnnnnntgccccccccccccccgtaggaaagcagcctcccaatgataagatgaggaggtgtaatctgcagttcagttcctcttccattccctttgcctgtctatctggggcctttgtggttctctgtttatcacagagaaaggagaggccttctgcactccggcttcttcagtcaatgcaagtgattttacacactcacccttgctcccagctggccctacgcacacccagttcagcaaggaacaattctggctgcaggcataggctcgttgatgggagtagaacactttgtgtgtcttagacagttaataaatgacccctgaattgattgtttagctgcgatcaggtcctggcgatttcctgtgacgcaaaagcaaagcgaatgtgcctggagcactcaggcaagcggcagaagtaacagggccacctgccctgtgatatggctccgtctggcccggcccagctctgcccagcttggcccagctgcattaaaggtgatctagagtccgcagagatcagggaactggggaagcacgccatacccctgttcttccaccaagacaggcttttttttaccagctttcaggacccaggtattagctcttcccttttggccctccgtttccttctagcgagattgtaatttttgtttgttggtttggtttggtttggcttggtttctcaagacagggtttctctgtgtagttctggctgtcctggaactcgctgtgtagaacaggctgaccttgaactcacagagatccgccagcctctgcttttcggagtgctgggattaaaggcgtgcaccaccaccacccaacaccagattataattctatgcgggctgattttgtctacttgttggctgctgtttccaattcccaggacccaagtagtggaaggacacacacacacacacacacacacacttgaaaaaaaaaaaaaaaaaaaaaaaaaaatctggctcaatcccacagtccccggctatgaactctctgtgtgtctggcaggcatgcactaccatgcccagtttttggggtactggactttgaacacagggcctcctgtgtgccagacaagcacttgaccaactgagctacgaggcccgatccacctttctgacacagatcttgctttgtagctccaggtgacttccttccagttcttctccatctcagtgatgaggccaaagagtgatgcctctcactctcccccgccctgcctgcacctccctcccgagagctggctttcaatctcctccttttcccccctccccccagcctgtgcttcaacccagggtcttgcactttacccagtgagtgcaagctctagaactgggtatgttgatcaacagaggctgagtggaaagattgagagacaccgggttctttcttttggggggggttggtttttcgagacagggtttctctgtgtagctttgtagcctatcctggcactcgctctggagaccaggctggcctcgaactcacagagatccacctgcctctgcctcccgagtgctgggactaaagtcatgcgccacccccccctggtgacacggggttctttatgttggtacagatttgaccatatgggagtcagcctgcagctcccttcgctacttcagtgtcagcaagtggagagtgtgactgaacccagggccacctgattgctaagccagcactctaccaactcagctacaattcccacacacacctttttgacccaggttcaaaatataatcagagggggaaaggtacagtggataaagttgtctcttgttgtctggcaccccatatttactgaaggccctccagtgggacttctacttccaaagcaccatgattcagcagcatctctcacaaatccccgaaagtcagacgcgcctccctcccctttttacagcagctgccacaggcccgtttctttaaaggttgggagagaatgtcccctcccagagaggcctcagggccagaggtggtgctcaataaaggctggccagatgccacccgggatcgcgtgttaggacgggcttgatctgctgccaagggtgagccctgcggtggttttctgggaagagtagatgccatgtgactcagaaccaagttagggaaaaaacaacctcactaagtccctggcaccatgccgccccagtatggctttgactgtgacctcatgaaagaggaagctgggcctggcagactggatggagctttgctttctcttcaagtttttctctctgctgtctcatagattccctagagcgtctgggtcctaagctgccgtcatcctggtgactcccgagcagttctggcacaacaccgatggctttccctgtctcagacaatgaaggagttggaaatcccacccagaacagtgggaggatggctcacaaggggaacgtgagggataacacgcatctcttctcctggtcagcatcaaactccctctctggatagcgcctgcccatttggagttgttnnnnnnnnnnnnnnnnnnnnnnnnnnnnnnnnnnnnnnnnnnnnnnnnnnnncagaagtggttgtgtggctacattccccagttcagaaaggaaaacagggactcccacattcccgggcagttgagccaccctcagcttggaccagcttagctagtgattttggtattcattaactattcaccaccagaaacaaagacagtgatgggccacaaagaaccttccaaaagccaggtgttgtcactggtgctggctgtaggctgggacttccactgtcacggctgggttcagtttgggatcaggtaatatggtttggggatgaaggcgtggctcagtggctggagggcttgctgagcatggttgaggcctgaggtttgatcctgccctcaaaaaccagactctgtggcacaagcctattatcttggcctctggatgtggaaaagtatcaggaggccaaggtcatatctatctatctatctatctatctatctatctatctatctatctatctatctatctatctgtctatctatggagtttgaagtctggtagccttcccaagaccctggctcaagaaagcaaaagcaaaagctaagtgtggtggtatggttgtaatcccatcacttggtaggctgaggcagggagctcattctgagttctagaccaacctgatccaagtacaaagccttaggccagtcaggatgccctagcaagacattgcctcaaaaaccaaactgatggcagaagcgatgtctcagtgcccaaaggtgctgccccgaagcctgaaaacctgattgcatacccaggtctcacgtggtgggaggagagaatcaatcctgtgaagttgttctcttccctcctcctctccatcgtgcatgcacctgtacacatgcacactaaataaataaacgcacagtaataatttttaagaaacttttgggccatcgagatggctcagagggtaaaagatcttgctgccaaacccaccacaaccctcatggtagaagaagagaactgactcccataagttaaataattggatgttttctttttccttttctctcttgtgctatttttgtcttaaaagctttttaaaaaagttttacacaggcacaagtggcacacgcctttaatgccagcagttgggaggcagaggcaggcagatctctgtgagtttaaggatagcctagtctacagagtgaactccaggacagccaggattgttacacagagaagccctgtctcagaacaaacaaactacaaagatttaattattgtatgtgtctgaatgttctgccagcatgtgtaccatgttcatgtctggtacccgcataggttaaaaggatgcattacatgttctggaactggagttacaggtggttgtgaactaccatgaggggcccagtcctctggaagagcagtaagagctcttaattgccctaatttgtcttaaaaaaaaaaaagatttatttggggctggagagatggctcagagattaagagcactgactgctcttccaaaggtcctgagtttaattcccagcaaccacatggtggcttacaaccatccgttatgagatctggtgccctctactggtgtgcagatatacatggaagcagaatgttgtatacataataaataaataaaatcatttataaaaagatttattttttctgtgtatgaatgttttgcctacagatatgtaagtgcacctcatatatgcctagcgcccatggatgctagaagagggtgatggattccctggaactggaattacagatgcttgtgatccaccaatacgggtactgagagttgtacctgggtcctctgcaagagcagccagtgctcttaaccactaagcctttttttttttttttttttttttttttttttttttttttaaacacagggnnnnnnnnnngtttctctgtgtaacattcctggccgtcctagaacttgctttgtagaccaggctgatctttaactcacagagattaacctgcctcagcctcctgagtgctgggattaaaggcgtagccaccaatggcagtcaatttatttatttttattttatgtgtatcttatttgtgagtgcctgcaggtatgtgcatcttttgcttagtaaatggaggtcagaagaggacattagatcccctggaactgaagtaacaagtggttgagtgctgaccttggatgctgggaaccccagcctggtccattgcaagagcagcaagtgctcttaacctctggccctctctgcagcccctatttttattctttttctgtttgttttggtaggaaagcaccataccactcagccacaaacccagctcactggtatatttttaactccaggagaattgctaaccttttttccgaagtggtttggctcttgagaaaggccttaattactttgtgtctcaggctggtcttggacggtcctgccctagcctgatgacaggcaaggctgcaattgccacgcccagcttgcaagagtgttaaggagatgtcatagaaatgtccctaaggcaaagtctcgttttcaaaatgcaagtcaaagcattttctttgtcaaagaacaggttcccacccgggttacccgaggggacagaactgagctggcatgttaccagaaacttcttcagacctgcacagcctgggagaccacggcagcttcagcaccaggctcgggactctctcccattggctctgtaccagtcctggtgtgtgtgtgtgtgtgtgtgtgctctctcgagtgcaattgcagttacagcagcccagactctgcagcttacataacaccttgtgtcagggcacggtgctaagggctgaactcaaatcttatccctacagttattgtctgtgtctttgtttcatggatgagataggcttcctcaagaccatatattcacacagtaggtgtcagattgaacccaggactccctcgttttggctcgttagtggtggcagggagtctagaaccgggtcaccatggtccacttccattttcacccatttaattttccagtgagcccctgggaaggcaaggctggtcctctgttgtcaggttgggagagaggctctgaatagctgggctgaggcaagctggatttggctcccaggaatttcggcttagggaacacacgctttcctgcctttctggggcctcgtgactctcagcatgctgctcactgcccttactcttaggtttggtggtttatgctactctgaaagcttaaactcaaaagtcgtacctataataactccctgggctacaggtacctggctggtcattctgacccaatgccacccttaaggagaggccagcaccccaatttgggtcctggtgcaggaggtgagacaggcagcgagtatgaccccaccctaaagtcttttttttctctagtatgtgaggctcttgaaggtctcaaggtcacctcagaggaccatttgcaaccatttgcaaccatggatgagggcaggagaaggtagaaggatcaaggccaccctgagctaccggagatcctccataaaaaaataaataaataaaataaaccaattagtctaaaagcaaaaaaaatagagccaatgaaggtcaaccagcaaatgcagctgctggtgaccagacaggaaggggcagagatacaaccttcccatcgtcacaggaagatgtggtactgatactaggccagacaggacaggaagcagggtgaccttgggaagatgtcagtgcagacaatggctttaattttgtgtgcaatgctgaggatgagcccagggaatggcacgtgctaagcaagtgacctacagtgccatcatacctcatctctggcctttttttttttttttttggatttttttgagatgagatggggtttctctgtgtcttggaggctgtcctggaactagctcttgtagaccaggctggtatcgaactcaccaccaccgggccctttgtggatacttttaagagtcacgatccatcccctctcagctgggcagtggtggtgcacacctttaatcccagcactcaggaggcagagacaggtgaatctctgtgagtttgaggccagcctggtctacagagtgagttccaggacaggctccaaagctacaaagaaaccctgtctgggaaaaaagaatgatccatcccctctcattctgtggtgtcttacactgccttacacaggagtctagaaaccacttcctaggaactctctgaagaaagagaaacacatttccatgcacgcccattacccacacttctacagaaaggaagcccagaatgcagaaagggaactgaggccactgtgttcccattctcactggtcacagggaaaaccagatagtccagagtgttctgtactggtgagctcagcagtcctcccagcagcagccctacaggacactggcctgtggctgaggatacggctgtaagccacagaacgtgctgtgtgaactccacactcatcagttgactgtcaaatgtctctcaactaagagcagtggaggttaagatgtaaaatatgggtcttaggcgggcgttggcggcacacacctttaatcccatcactcgggagacagaggcaggcagatctctgtgagttcgaggccagcctggtctacaagagtgagttccaggacaggctccaaagcaatacagagaaactctgtctcgaaaaagcaaaataaataaataaataaataaataaaatatgggtcttgaactaggtatagtgcacatacctttaaagatagtacaggagagttagaaacaggcagatctctctgagtttgaggccagcctggtctgtgttagcgagttccaagccagcttaagactacatagtgagactgccttaaaaaaaaaaagtttataagctagttaagggaaaataagagataagtatacccacataaaagtgtttctatatttctgtgtgcctccatctcacacataggaactaacattattatttcacgtatcagaccatatataacaagtacttttctccttctatgatgaagccacagagctaggcgtgactgccagtgcctattaatcccagagctgggaacctgaggcaggggaattgctacagatatgaggtcagcttgttcttcacagagagaacttgtcttacccccctccgcacacattctccacagggggaaaaaggagatggagccagtgacagagctggctgagtatgaacagaacgcaaaggcagagaacacaagtgtcctggaatttacttggagtgaccttatcatgggacaggacgaagggcgaagtttcagatgaagcactgaatcagcaggagagtccctgtgacaccgacctggatttaactcctgctcccttactgacaatgaaacttacccatctttcccttgtagcttgttgttgtggtttatttgttgtttttttttgggggggggcggttctgagacagggtttctctgtggctttggaggctgtccttggaactagcccttgtagaccaggctggcctcaaactcatagagatctgcctgcctctgcctcccgagtgctgggattaaaggcgtgcgccaccaacacccagcttcccttgcagtttttaaggagataattgaaaagtccgttttactttctagaaggtaaaatgtgtattgacagtacttagtggcttatttcttctccattctccattcagatgatcggcatattgaaaataaaaccaaaggcccatgcattctcaggattctagacacagtgatttggacactcaggtgtaacagtgcttgctctgcctttattttgtaagcctatccatgataagtctccactggcctgtaccagcacccagtccaacactgatatataatcccagctctgccttagttcccagagtgaggaacacaagaagcccagctttgcccaccaagcaggcttgcctggcctgggacacagccacttccttgccagcagggatttggaaatattctaagttctgagtgtgtaacctcagtttccttacatttttccaatgcctttgcttttcttcttcctctttcgtgagcccgtgcagaacggaggtcaacttctgctccccacccaccttttttttttttttgaaacaggatctcttaccgaggcttggaaagacggccatgttgtcccaggcagcagcttgtccccacctcctcagcactgagattgcaagggagtgcccagttgctcagttgtggttttctgtttttgttattactattgttgttttgagacaaggtctcacacatagctctaactggtagaccaggctggcctggaactcactctgtagaacaggctagcatggaactcacagagattcatctgcctctgcctcctgagtggtgagactaaaggagtgttagagcaaggctagcatatccggctagattgattttactttatttatggagctggagagacagctcagtggttaagagctctggttactcagattcaattcttagcacctacatggtggttcacaattatctgaaactccagttccaggggatctgaaactcttcttctggtctctcagggcactgggcacacacatggtgcacaaacatacatttaggcaaaattctcaaacactaaaaataacgaagtaagtaataaaagattttttaaaagattttattaatttgaaaaaataatttctattctatttatacaaatgcatgctttttttcttttttctttttttggtttttgagacagggtttctctgtattgctttggagcctgtcctggaacttgctctgtagaccaggctggcctcgaactcagagatctgcctgccttggcctccctagtgctggaattaaaggcgtgagccaccaccgcccagcaacatatacgtgtttttgtgagggtatgccacatgtgtggatgcccgtggaggccagaagaaggtgtcagatcccctggaggtggggttacaggagattgtgagccacctggcttagctttttcccatcccatttccctcactttctctctccaattcaggtcctctgcaagagccacaagcacttttaacggcagagccgactctccagacccaagttttggcattttggagacaggatcttactctttagcccaggctacattggagctcaccgtgaggttcacattggcttctaactttaagcaattctccctacaacccacccagtgtttagtgtagtattgggttcgtgttgaccgtttaaagttccaggagtctcctctggtcagttgaggtcaggtcagggtaaaaaggaggagccgccttctgggcgtggttgcaaggcctgtaatcccagtgcactgaaggctgtggcaggaggattgctgtgagttcaagtccaggttgaactgcagaatgaggccttgtctcagaaaaccaacaataaggcaataatcctagcactacagaggtggacgcaagcgagtgaggaactcaaggccagcctgggtacatgagacactgctcaaaaaaagcaaaaaccaaaataataagaaaggacacattaaccaatagctttttgttgccttgctttgctttgttttttgagacagggtctttcgtagcccagcctgaccgtgagctcccgatcttccagcctcgcttgggtgctgagatttttaggagtatgtcaccatgcccagattttgctgttgtcattgattttgagacagggtcttgctatgcagccatgcctggcctggaatttttggtatgtaaaccagagacctcaaggtgacagagagcctctgtcccttcagttctgggatgaaggcatgacgcactatgccagcaatagttctgatttttttggcacagggtcctatagcccaggctggcctggaattcactgaatttctcctacctctatctcccactagaattacagacactgcacacaggtgactccctgcaagaacatagcatccgttacgggaggacagaatgggtgtaggatggtcaaacctcagaaaacacacacagcattcccattccccacactccaacttctaaatatccctgttagacgtagccaaggaatctaccaaaggtttttttttttgttttgttttgtttttgtgagatagagtttctctgtgtagtgtgtagccctgtctgtcctggaacttgctctgtataccaaactgtcctcaaactcagagatccacttgcctctgcctcccaagtgcaggcaccatcgcccagatttttgaaaaaaagatacataaaaataaacctatctgtgctggattgtaaaaatcaccttttatttttatgtgtatgtgtgtgtagttgtgtgagtttatgagcctcacatgaactcaggatcctgcagaagagggcattggatcccctggaactggagatacagacagttgtgagccaccatgtggatgctgggaattgaacctgggtcctctggaagaacagccagtgttcttaaccgctgagctatttctctagccctttgtgctggatttttcccaagaagatgaatggatggcttaacaagtttggctttacttactctcagtactgatcataaggactaaaggagatccagttggaaagtgtctgttacgggtcctgtatgtggcaagctgcgttagctgcctgtctccttccagcctttgctgctcaccggagccaactagagctggccaccctagttccccagaggcatgcgatagataccatgatggcaacttaaagttgttgtaattatcacttttagaggtgcattcattttcatgtgtatttatgagtatctgatctgcttgggcaccatatacatgcttggtgcctggggaggtcagaaggaggtgttgagagcggggagtggggttacaggcagctctgagcttccatgcggtgctgggaaccacaccccagtcctctgcaaaagcactatgagctcttagctatggggccatctccccgtcatcattattttgtttatttatctgagtctgtgctcttgggtgtgtgctctgctgtgtgccatggcacgcacatgaataactctgaagagttaacttttttccttctaccatgtatgtgtgtctggaattgaactcagtttatcaggtttggtggcaagtgaccctcagaattatcttgccagcccctggcaacttagtgctggctttggtaggagtatttatattatagaaatcagaaatgaagcaaatcagggcctctccaccctgactccaggcagacatttctgttcccttctttctttcaaagatatgagctgaaccgtggaggacggtgtgccagagaggagaagtttggctgtgagtgacacagcatggtggcttctctagctataaactcctttctcactgacagagtccaaatcaaggcagatcaggacataggcggctgctctagctgtggcctcactgtcctcagcacctggtagaatcttcatggttcaaatcaagatggcagcttgaactcttgccagtagggggggcacactcctgttaaagaccaccgaccgaagaaactcctggctgtgcatacttcaaatgtgctgaaatgaagtcctgctctgtctggctgcaggtggaggtctagagagggctgagctggccttgtgtcctgtgggaactgggaggaggagggtggcttgggcagttggccaccccacccacaaaggagcagtgcttggaaacctgtaggaaggggagaggcaagttggtgtgccaggaagaaggggagtttgtgctttgagggaactaactggaatagaagcaggaatattaacaaacgaggttaagtaaataaggtggcgacccgctctctgagcatcttggaaaggagacaaaagaatcttttatctcccgccatttggttactccaggcagtagtgaacttttcttcagaaagacaaatcatcagaggcattttagaattttaatctgacacacatgtgtgctgaacccatgtggagtaggggagagacacgaggtgtggcagggagcaccttcaccttcatgaactggcgggaggcatggaagtgaagagggcaagaaaggagaagcagttgctaggagatgctttgggatggatggatggtctcataatggacttccggatacggggtttgagggccaggctcccgaggagaaaaaagaaaaataatacactcgataggtgtttgagagtgagttacctagaagcacaaccataggcagtaacttgtgttcaagggatttactggaggacactctcaggagagagaaagtgagggaaatgggatgggaaaaagctaagccggtgcacacttagactggaaactgcatcagagagtcaggagttaggcttgcctcagagcaagggtggcggtggtggtggtggtggtggtggtgtgtgtgtgtgtttctgtgtgactgtatgtgtgtgtctgtgtgtgtgactgtgtgacagtgtgtgtgtgtgtgtgtgtgtgcgtgtgtgtgcgtgtgtgtgtgtgtgtgtgtgtgtgtgtgtgtgtgttgtgttgtgtgttaagtgctggaacaggatcttggcccaaatggcagcagtggaagcatccgtgttgggtgtgttggatttgagtttgtaaggaaacaaaattggcgatagctaatgagaactgggaggcctgaggtcagggttcacatctgaagaatgggaacagacacacagacgttggactgggcgacccatggcacacgggtgacatattgaacaagcttggagctcgtggaaggtcacagatggacagggggcactccttttggaagacagttgacaccgtggtgggaaggtgggtgggaggagaaggacacccggtggtgtctttgtcaggacggggagtcaaaggaagatgttgaagggcactgtgtaggagaagaggtggaaatgtttttgttctgagctgtgctggcctttcagggaaaagctcgttgctaactgggtgagaagccacagtgagctcatattctgaggccagacattctgacaaacttagaccttccctagggcactttattttctgttcctttttggtactgggattgaactttggactctcacaagctagacaagtgagtgtccttccactgagctatagtctcagcctctgaattttttttctttttttttttttagtattcatttttattttaggtgtttagggtttctctgtgcctttagagtctgtcctggaactcgctctgtagaccatgctggcctcgaacttacagaggtctgcttacctctgcctccagagtgctgggactaaaggcatgcgccaccaccacctggcctccatttttaaaaattttgaggcaagttcttactaagctgcccaggcttgtcttgaactcactctgtagcccaggcaggccttgaacttgtcagctcccttaacctcctaagaagctggggttacagccccagtcgctagtgagccttgggctgaaattcacaaattgctcaactgacctaaaacgacttcatggactggttgcatcatatacacagcaaaccactctgccttggaaacaccagacaggctttgccatgttcatggatcctgccggtgaggcactggagcagagtagtggggacaggcttgcctctgaaatgggcaactggaatcacccacagcctcctctaccccagtgggtagtgagtgggttccggctattgttgcagggcctcaggtctcccggggtggtaactgatctcatgttaggactggaaactgagggaatgcctccaaggacaagcagtgtggagaaagccttgaggtgtttttgctagctcaggcattgctggccacagtagaaatgggtctcctttgctttactttgcatttctcttgcatgctggatggttgctaagagaccaggctcaatccctctccccaggcaaaactagggctcaaacccaggcctcatgtgtactgtgcaaacactctaccaccgagctttaccttagccccctgcttgatgccactttcaaaatatttattttattttattttgggttttttgagacaggatttctctgtgtagctttggagcctgtcctggaactcgctctgtacaccaggctggcctggaactcacagagatttgcctgcctctgcctcccgagtgctgggattaaaggcatgtgccaccaatgcctggcttattttatttttaataatgattatgtgagtatgtctgtgtttgggtatgtgaatgcgtgaatgcaggtgcccaaagaagctggaggggggatgtcgtatcccctggggctggagttccaggtggttgtgagctgcccagtgtaggtgctgggaacaacttgaccctgtgcagaacaagtgctcctcactgctcagctgtctctctagtcgttcccctccccccttttaagtaaaagccgagaaaggagatctatttgttatggtcacattaggaacaaataaaggatttcagtgacaccccacttctttttgagacaggttctcatatacaccagactggccttgaacttgctaaataaccaagaatgacttgaacatttttttttgtttttgagacaggatccttctctggccgccctgggccttgctatgtagaacagactggttgaaatcccagaggtctgccagctcttagtcccgagtgctatgattaaagctgtctggcaataactttttctctttgaagttgcttctgtccttccactgtgggttctgggaatcagactcagtcagggtggagcttttaacttctgaatcaggatgactcttccttcctcccttccttccttccttccttccttccttccttccttccttccatccctccctccttctccctcttcctctctcttcctctctctctctctctctctctctctcttggaggacactctcaggagagagaaagtgagggagcctggagctcactgtgtagaccaagctggcctcagactcacagagatccacctgcctctgcctcctcctgggtgctgggactaaagtaccattaaagccttttaacaacctcctcctccttctgctttttatgacattgatttacctacttttgcatatgaataacagtgtgtaatgtggcgatcagggaggaactgtatccatctcaagtgtcaggcttggtgacaaatgccttcacttaccaaactaagctatcttcccagactgatagcatcacttttttttttataaccgaattgctttcctcacaccccattggacagaatgggctcccacagcagagtgtcagtcatgtgccaaggagagcaagtagcaggggcagtagcaggggcagtagcaggggcagtctttggaaaatgctgtagttgtcccttattgtagaaggatattttccacgacttcccttgtatgtctaaaaaacggtaccaaatccacataaaccatgttatctatgaaaaagtttaactcataaattagggacagtaatagataaataataagtacagtaatatagtatacttattataatactgtagtaaagattgtgtaatgcagtctcttgaaatagcttactgtggttgggcagtggtggtgcacacctttaatcccagcactcgggaggcagaggcaggtggatctctgtgagttttaagccagcctggtctacagagccagttccaggacagcctccaaagccacagagaaaccctgtctcataaaaaaaaaatagcttactgtgtagtactcatcctggattttatgttgacgtgatgaactgaggggcttgacataggcattgtgacacagcaccaggccactgctgacctttcaagcatatgtcggaaggctcccatcccccaggggatcctggatcacgggaccatgatgatgcaaaggtgagtagtgtatacagaatggatacgctggacagagatgattcacaccctgggtgggacagcactagatttcatcacgccactcaaagcagcagagctcacgggttgcttatctctgtaattttccatttgctattttcaggagtgaccgagacctgagtaaaagcattggtagggttattgctgtagatgtctgtggccggaagggcactattcagcccaccatcttcttttcacataaagtgtgcgaattgatctacagtagctgtcaagaggatttcagtcgagggaactgaggctcagaggggaaagtggtttggccctggttcaggtccaagcattcagttgtgacaggaggtgacccaggtctttaggtgctcatctcaaccaagaaaccagtgctttcaccctgggatgtttctttagggtaatgaccccatcattcccatatcagcatggggccaccacaggggtacaggcaagccctgggaaccctgctgactggttctgcattttagaggcatggtgacttattttatttatttaaaataattatctatcatctatctatctatctatctatctatcatctatctatctatcatctatttatctatcatttatctatctgtcatctatcatctatctatctatttatctatctaccaatcatctatcttttatttttctgagacagggttttgctgtgtagccttgactgtcctggaactcgctctgtagaccaggctggacttgaactcacagagatcgacctgcctctgtctcctgagtgctgggattaaaggcgtaggccatcaacacgcagctgttattttatgtgtgtgggtgtttcgtctccatgtatgtctctgcaccatgtgcctgtctggtgccagcagaggccagaagagggtgtcaggtcccttaggactccagttacaggtagctgtgagttatggggtgctgggagccccaaaactagcccttctaaaggagaagctgatgctcttaagcagtgagccatctctccgacccaaacattaggtgatttaaaatgaagactttaggtggagctggataaacaaattttcaaaatgacgactttatatgatttcctagaacacagccttcacgctgagttcagcttctgaattggaggggtcaggaggaagccccctccaatcccatctcagggtcctggttgatgagtgaggggtgcaaggtgggaggtgggtgctaatgggatctccccagggacagctcaggtggagcctccagacccagatctgcacaggaggaggggaaaaccaaagtaggtagtggctggggctagttcctgtaggttcaactcagaggtgttaggtttttgcttaaaggcgcgctctatggaacatgaaccatggagagcataaagagtatattaattatattaagatgggagagtgagaaatggaagaacagagtagagcagagaaagagaggtacagaaaagtgtaagagaaggaagagaagagggagagaagaggatgcagagagggcttgtttgggtgtcaaatgttattcttttgcttaaattagaaatgaagaggacgggcgccgaggacgaagaggacgggcgccgaggacgcagtgcacgatgggtgcttatctcatccgggagcaggccaggacagattttgggacttgcatcaaatcaagcctccgtttctaaatcttgctggtgcccttctctctccccaagcaatcttcggctatatctctttagaaatgtcacaggctagcgatttcttttggagattagagatcaggaagggtttttgaaaccacaacttccacttctcatgcggggactggaggcgcagggctttctcctcttttgttgtaccaaggacggccacctcttgctcgacccacattcctgnnnnnnnnnnnnntcctgctcccctaagacaccagcagagtgttcatggataggtgttctttgttttatttatgtgtgcatgtatgcttcagggattctttgccggaggaggtgtaaacaaacatcttcctctttattggacaccaaaccaaaccaaaagtaacatttcaccaaagtccaacttggggaaccagtgtacctggggggtttacctaagagcacaggtgaggggttactcacaggagcacgagtaacccccccccaaacagccacagcactggatctcaccctaaagtggatgacaacatctgtcctatcttagggttgatcttagctgccctcctatgctccagcttcctgggacactcttgaaaaatggacaaataggtgggcatcaccacggttatgtcgggactctgactgggtgccttgaggtacacacataaaaatcaggttttgtggctcacaaccacctataactccagctccgggggacctaacacctctggcctccatggacactcgtactagtgtgtgcctccctgtgtatctcaagctggcctgaaacttactatgtagcccacatggacttgaacttgtggctctcctactgcctcagcttcctgagtgctggggttgcaggcaagtgccaccattcctggtgtggttgggctttctctgcccagttctcccatcctctctctgctgaagggacagactcttccatgaaatccccgatgaaaactcactgtgtctctgaccgcccccattgctccagcttcaccttcgtgggctgtgggcgggcttccactgtaccatgggtgagtcacccttgtttctttgttcatgcctggttcatgcctcctggttcccccacacaggaattactccccacttatgtcatcagtgccctggaatgtgcactgtcctccaagatagcctttctctccacatcctctactgttttgtttaaactaacaattattttccctcttcggagggttaaaatgagagtgtttgttgtggaaaatttagatgcgaaatgtatgcaaagaaagaaatacccacaattctccaacctaatatttctcctctctgctccatgctccaggctttcacgcatgcctggtaatccttctgctttattttgacaagacctcaccatgtcacccaggctggtttcaaacccagagttctgcctcaacctcctgtgtgcaggatggggatggtggttacgggccaagcggcagcatgctggatgctagcttttccttctttctaagagacctcctgccgtctcccctcccttgtcgctctatgagtaaatcttgtcccttctgttgtaaattcattctttgagaaatctttcctcccccgcaagtcggaactcctgtgacacactctggacccagtatttttccttatagaagtaaccacagctagaaataaactgacatttgatttgtgttcctcttgtttgatatgtctcttagatacgtgacttgatgtacaagttaagaatggcctttcctgaggggcgttggtggtgcacgcctttactcgcagcactcagaggcagaggcaggtggatctttgagagttcgaggccagcctggtctacagagcgagttccaggacagccaggaaacagagaaatcctgtctcaaaaaagaaagaaagagagaaagccctcccacccccgtgtgtgtagtctcatcaagcagctgaggctaacctcagactggtgactctcatgcaagctgagacatgtagacatgggctaccacgcttgccatcttcttgtatgtcctaacggtctcaatatgtccagtacactgaagacattaacacattgcaccagggcactgtcctagaaaaaccatgtgcccaccctcagttactctttttttatttgtttgttttgtgttttttgagacagggtttctctgtagctttggagcctgtcctgttactcactctgtagaccaggctggcctggaactcacagagatctgcctgcctctgcctcctgagtgcttgggactaaaggtgtgtgccaccactgtccagcatcctcagttactctttgtaagatcaatttgaagacagaggatgtagttcaattggtagactatttagtaagtgggctgtggtttcagtccccagcaccaactagaataacttgggtgtggcggcacatgcttgtaatcccagcactcaggaggtagatgcagagggatcagaagtctgaggccatctgcagccacaaggtgagttcaaagccagcttgggcatgggagaccttgtctttaaaaagcagggtgtcagggacagggcactgggaaactagcttagtgactaaaagcattgttccccttgtagaagaccctggtttggttcccagcatatatgtggtgggccaaacaatctgaactctagttccaggggatatgactaaatcttctcacctttgcaggcaccaggcacacattggttggacgttatacatatgtgcagacaaaacatttatacacataaaaataaaatgaaaaatgaaaggatcagtgggtagagatggcttagcagttaacaatgcatactgatttcacaagaggacccaagtttgaactctgtctcccatgtcagacgatatatgatggcctgtaaggaagctccaggggatcggtgccctcttctacccatgtgcaggtgttcgagcacacagattcatataaacacataactaagaaggatcaatttgacaaacacagctcctcaattacagtgcacctgacatggtcccagggacaggacaaggagccagaggttcttgctcttgctcctgaggagccctcagtcattgaggaagaaatattagtgaatgagattcctatacatctctcaactatactacagccaaggttaggctatgttcattggcagaatcctggggaagtgacacccaccaatcccaccacctttttttttgttgtttttttttttttttggttgtttttgagactggtttctttgtgtatccctggctgtcctggaactcattctgtaaaccaggctggccttggactcagagatctgcctgcctctgagtgttgggattaaaggcatcccaccacggccagactcacccaccctctcaaagatgatttatttttatgtgtgtgtgtgtgtgtacactacatgagttcatgtatatcatacgcatgcactttcctcagaggccagagaaagtgtcacgtctcctggaaatggagttataggtagatgtggaccacctgatatagatgctgggaaccaaacccaggtcttctgcaagagcagcatgtgctcctaactgctaggctctctaaccagatttaacaccacttttaaatttttgcccttgctaatgagttaacctcacaggatctggtgtcattgggttatgtaggattgtggaatcacaggttggtgagataacattgaaggtaccagctccccatttcagcagccataacagcttttctgaccttgccttggttactagaggttaggtgcctgcctcgtggcaaggaaccaatcagaagttagctagtggcgctatgctttaaggctctgggtgtgctttacggacaagtgcacagcaatgactcatagagcatagcaaccaccttgggagggcctatgggccataacaaccagttggccaatcaacacagggcaacccctccaagcctggacctgagcccgtgcgtacccctagacactccccttacgctgccctacaagatctctatgcagcccctttgagcggtctttgctagccatccgccttggcgggtaggtgaaagacccgagctaacatggggtaagcttgttaaacaataataaagcctcatgcagtttgcagcaagctttcgaatctgcctggtgattggggtgaccacagtcctgggctgggaccccggaggcctgagttttccgggggtctaacaacagtagtgcaatggcaggtgggaaaccgagccaggacagaaaggcagaatattgcagggatctggagggggctcttgccttggaatcttgttgaagacgagatgccaaattgagagccaaggatgccaacaagggccaggaggatggctcactgtggcaaagtctgatgacctgagcctgatccctggaatccacaaggtggaacgagaactgtctcccacaagctgtcctctgacctgacaccctacccccatacacaggaagtaaatacatgtaataaaaaaaactttacagaaaaaaagaattccataacaattaacatttgctgtggaagttgccaacaaagagatgatatttcttttatattgagaggtgtcaagtaggaatgttaaaatagcaatgaatcaggcttgaggactaagcatatatgacgctggtccttgcctcccttttccggaatttcacaaacaagactagtaacttttgtttgtttctttgtatctatttatttatttgtgtgtgtgataggatttgtaatttctgtttatagtagcaataccctaacctcccgagtgcctgtgacttaaaacttgaccttatccatgcaatcccgtataaaaagactcacttaattccttagcaaccctttgaagaactcaccaaaattgtacacatgggggctaggagtaggttttacttggtagagggcctgcctagcatgctgtaggtttcatgcccagcaccccacactctgggtgcatgccctaatattatcccagcacttggagagtagaaacaagtggatctaaggtcaaggtcatcctgggatatagcgagcttgaggctcttctgggctactggatatgctgtcacaagtgacaatagcaacagtagatacagcaacagtaacaaagcaaaacccaggttttggaattcctagcagaggccatggctctttctatccagtccaccttaaaagctttcagtgccctccgctcctgcttctcccattctcagaatcttttttttttttttttttttttttttttttttttgtgtgtgtgtgtgtgtgtgtgtgtgtgtgtgtgtgtgtgttgtgtgtgtatgtgtgtgtttagacaggttcttgctacatagccctagctggcctcaaatgcacagaaatttacctgcctctgcctcctgagtgccactatgcctggtaatccttacatattttgatttttccctcataaagatctttctggcgtccacattttccttctgtccacatcatcacaccctaagcctccagcctggagcgcctgcttccacctcccacctctgccctctgctgctctggcttagatccttctttttgaagcctgattgagccatcccagatgcaagcaagcacacacagcctttccctggctgacaactccagtggcttcccacagactttgcaaaatgcgttcaaaggcaccggagagatggctcagtggctgctcttgcagggcacatgggtttggttccagcaccctcatggctgctcataactctctctttaattcctctttctctcctttctttccaagacagggcctcatgtaacccaggctggcctcatgtagcccaggctgacctcaggcccactgtgtttgaggataaccctgaatttgtcaccctcctgcctctatcactcttcagagacactgccatgctgttttatgggcggcctgtcatctaaagctctgccaaccgagctatatccccagtctgtttggttttttgttttttttttcttttctattaaaaaaaatacaagtcaggtgtagtggcacacgcctttaatcccagcactcaggaggcagaggcagggggatctctgagttcaaggccagcctggtctacagagtgagttccagtaacagccagggttgttacatagagagagcttgtctcaaatttttaaaaattaattaattattatttatgtatgagtattttctctgcatataagtttatgcatcgcatatacacctggttccccatggaggccagaagaggactttggaatccctggaactggagtcatagacgattgtaagccccagtctcagtagtaattatatccttcttgtgtaatcttgtttctcatggctgtccagccccatgcttgcctatgcaagctggacatggtggcacctacatctgtggtcccagcgttggcttggcagaggctggagaatctcaccttgagttccaagccagcctggtgtatataatgagttctaggccagccagtgctacatagtgagacacagaaagggtttgggggaccgtggaccaggggccactggaaggttgtatgtatagccggaacaaagcccccacactcgcactcccgtgccccagcctgtgcatctctacttttgaaatctctttatgatgaactggcagacacagcatttccctgagtgctattgtagacagaagtttctgtcctgcccagtccctaggccatttagtcccaaataaacacacagaggtttatattaattatgaactgtttggcctataactcaggtttcttattggctagctctcttaattactaacccatttctattattctgtgtatctctacatggtcttggcttactggtgatgcccagacctcttgctcccttggcagctacatggcgtctccctggcaactcactctctgaattcctctcccagaattctcctagtctggtagccccacctatacttcctgccttgcctacatcctgcccgtccattgaccaacacagatttatcaaccaataagagaaacatattcacagcacacagaaagacatcccccattagccgtgagctgtattcacaaggtaactgattatgtagaaggaattatgggaatcccaatttatagcacagttaagacgaacttggacactgtaatgaagagttatatgttgacttgacacaagctagagttatctgagaggagggagcctcaattgggaaaatgcctccataagatctggctgtaagacattttcttaattagtgattggtgtgggagggcccagcccattgtgtgtggttccatccctggactggtggccctaggctctataagaaagcaggcagagaaagccatgaggagcaagccagtaagcagcaccctccatgacctctgcctcagctcctgccctgtatgagttcctgctccgacttctcagtgatggactgttaccttgaagtgtaagctgaaataaaccctttcttccctaagttgccatggtcaggctgtttcatctcactgatagaaacctaactaggacagaagctggtgtgagagttatggggtactgctgtgacgggcctgaccatgtttttgggaggactgtagaaggattttggaactttgggcaagaaaagtcattgagtgttcagagcctggtgagcttttttggtgggagctgaagaactggttgacagaggccaaaatcaccaaagttaagcttttcctttactagatgttggtcagccagggatgaagactcggttgcgactaagaagaggccagccattgaggggaaatcttctgggacttcctcagggtcagccacacaagctgtgttccagaggtggtaggtaaggttacaactcatgctggcagatgaggttgatactgtagtgtaagagtcacctacgtggtcctggttttgaaggcatgaaggggtcatggagagtagctgagacttggcgttgtgtgacagggttggagtccctgaagagagcccagaagacacggtgaaaagtgcagcccagttgcaacaagagacctatcttagttagggtttctattgctatgaagagacaccatgactatgacaagtcttataaaggaaaaagaaaatatttaatgtggtggcttgattgcaattcagaggtttagtccattatcatcatgacagcctgcaggcagacatggtgctagagaaggagctgagagttcttgcatcttgactcacaggcaacaggaagtgtggtctgtctctctgggtgacacacttcattccaaaaaggccacacccactccaactaggccacacctttctttctttctttctttctttctttctttctttctttctttctttttttgagacagggtttctctgtggctttggagcctgtcctggaactagctctttagaccaggctggtctcgaactcacagacatcctctgcctccccagtgctgggactaaaggcgtgggccaccaatgccttgcaagccattttcttttaaaccaccacaggcactggcgtgtttccttatcagtaaatgtgattaagatttttggcttccagagagcactagggactggttttgtgcttttccaactcctaaatcagaaaatgtatagccttttttcttatccctcagtcaggttctgtctaaaccctgggaatgcttccctgacacaccgggctccttcactctgtccctcaagccctccccactctttgccatgtggcttctggttggcctccaccgcaaacagcatggctttccctctttcccccctccagcccctttttttctggcagttgttgggatttgcaactgtttttgtagtagttgttgttgttgttgttttgggtggggccctgtggggctagagatgtgtctcagttggtaggctgctgagtcatccgtcatgcgtaaagccctagagtcagtccccagtgccacacagaactgggtgcagtggtctacacctgaaatctcagcatgtgggaagtgtagacaggaagatccgaagttcgaggttggggctgagagatggctctacagagagcacttaacactcttccagaggactcaggttaggttcccggcacctgcaataccactcctaaccctagctccagggaatctgatgccctcttctggactctgcaggcacctggtaggcctggtgtacagagatgcacacatacacataaataaaataaatgttttttaaaaagttcaaggtcaccctcaactagtcagggtctggcttgggatacataacaccctgactaaaaaaaattgttggagcctactccaaggagtagctgggttacctgagtaggggcgtgaggattgagaaacagaagataaagaaatagatccagaaacataggatagcctggcagtggtggcgcacacctttaatcccagcacttgggggcggaggcaagcagatctctgtgagttcaagaccaggttggtctacaacagctagttttaggacagcctccaaagccacagagataccctgtctcgaaaccacctactccccgccccccccaaaaaaagaaacacaggacagattcaggaggactggcgggtccatgccttttagcacaccggacagccccaagtttaatttagatcctgcttaaatacagactggaggcaaagcagaataaagaacagtataatcaattaaccagctccctgcactctccttgaattgaggagcaggcaggttcactatctatcatgttggtcctgctagcagctgcattatctgtctgtgtgtttacagctggaatcagtagctccttagagagataatttactctatctcacgggcttaatcagaaatttctcacagctctcaaggagactggagcaagcaagctggaactctaatgtcttagaagtcaggatagactccagatggaaaccgagtcacttgtgggctcccacaaaaaataaatagataaaaataaagtggtggctgtgagttcgagaccagtctggtcttcaagagctagttccagggcagcctccaaagccacagagaaaccctgcctcgaaaaaccaaaaataagtaaaataaaataaaataaaggtggtggacaaagattgggtttaatctccagcagtgccccttcaaaaaaggagggggccatttcagagactgacatcttgttctgaaggatttgaccccatctctagaacaggtcaggactgcataagattagaatgcttggaaaggacaattcattatgaacttaacgtaacaatttgtttagaactaacaagcaataaaagtgtctcctcagggcagcctggacacagctcccttgtccttgtttattttattttatttttttttttttatgttttagaagaagcaggaagaatctggctgggacctgtttctggtctggtagaaagggtcagaggaggggctagtactctgctggctgctggactctggacctctgggaactcagagactggagcctgtgcactttcttcaggtcacagggacccctcggtctgttctagagcagagctgcaggtgggactggctgcatgagaccatgaatcaggcactttcagagccttggcacaggtccccaaccccagctagcaccagcaaagatcacagagaggagcccacgcacggtacttgcctgttatcccatcatccctgtaatcacatcaccccggaagtaaggacccagaggttcaggctggtctcagctgcatatagaactcaagaccagcctgggctacaggaagccttgtctcagcaaacagcaggagagaagctggagatggctccgtgggtgaagaagcacttgctatacaagcatgagaacctgaggtcaggtcccaagtatctaggtaaaagctgggaaagaggagggtggattccaggggctcttggccagccagtccagcataaaccacaagctctggggtcagtaatagactgtgtctgaaaataaggtacagagcaataaaggatgacatcaaacagcagcctcctcttcctcatatgtccttacgggcgagtgacctgcatggacacacacacacatgcacacacacacacacacacacacacacacaccacacaggccacacataccccccacacacacatgcacaccacacacaggccacacatactacacataacacacacacatataccacacacaccacatatacaccacattcacacacaccacacttacacctcacacacataccacacacacacaacatttagacataccacacacacacacacacacaccatacatataccatacacacaccacatagcacacatgcacacagcacagaaaaacaaaactgaaataactaaggtaataccatcctattctgattctattttgtgtttgcgtagacagttcttagccccctaccttcctccccacaacagttatgtttgccttgaccacatatttgagattccactgccgagacctcagtccagttgtactagccaaaataatcgacaaattacatctaaaataacttctgtgttctgccaggaatgaatgcttcagagttgcactgaccctcatctaactttgatgtattttcctgggttttgcgtttaaaaactgtatcccttgggctggagagatggctcagccgttaagagcactggctgctcttccaggttttaattcccagcacccacatgtcagctcacatctgtctgtaactccagttccaggggatctgacactttcacaccaatgtacattacacaaacaaacaaacaaacaaacaaataatactgtgtccctaaacttggacacccagagacttttgagaggcccttgtgtagcaagaggttccacagagcctttgcatctgggttgaacccaagagtgatagcgcctaggattttccatcttgttaaaagtctgggattgttaccttttgttaaagtccaggattgttaccttttgttaaaagtcaggaactgttaccatttattaaaagtccttttgttaaaagtcaggaactgttaccatttgttaaaagtcccgggttgttatctgagggatccagacacgctaggactggaggtaaaaagtgaagtctctgggatttggcagggacattgggaatttgaactccccaatctcgggagcagcattatgtgcagttactgaaatgcttgttaaaaggtaaagcacaattattgcaaatattaaagatgcaaacattaagtccaggaaaaaggcttttcttggtagaaaaaagaaaactgtttaatgaggaaaaatggattttcctgctagaagggaaaatgtttaatcaaggcctacaaataaaaagggcccataaacaaaaaaataaagggaaggggggggagctcttctgattaggaatagaggaaggagaaaggctcttactgatttaaaaaaaaaaaaaaagaaaagaaaagaaaagaaaggaattactgtcaggtggcacccaatgctctctggctacaagctgcctgttagctccttcagccaaggggctgggcaacgaaaaagagccaaaacacctgaattccaaagaatggtgaggttgctccacagttgcagcctgagccagcacagcctgcccagaatttagaattttcctggttgcttaattttggtttaaatgttttttgtttttccctcagagcaggaataactcaatgttaaaggtcccttcattggaaatgtttttattttttcctaacagtgggaataactcattatcaatggtcccttcatgagaaaaaaaaaaaagttaaaacaagtccaatttcagcagggtggtggtggcacacacctttaattccagcacttgggaggcagaggcaggcagatctctgtgagtccgagcccagcctggtctacacgagctagttccaggacagcctccaaagccacagagaaaccctgtctcaaaaaaccaaaaaaaaaaaaaaaaaaaaaaaaaaagaaaagtccaatttctcgtacaaaacaattgcagtcagagcataaggtactaagccaatgaatgctgtttgaatttccagagatattagccattcatgatatggaggatattattgtcccttgatcctctgattaatgctttaatgaatgtttaattttcatagtaaatgaactaaatgagcaaaatccataattttttaactgtatcgttgggagtgctcttatctgtttatcactagtgaggatttgattctgctctttggattgctttctgaaaaactcttggttaaattctataaaaaatgttaacacctgaagcagagcaagttgttagcttattaagtaatctggtgctaaggtgaagaaagctccacaagtgatctcttactgataaagagccatgacatctggcttgaattctggatgcgcctgggctctgaactgccttttgttaagaagtcaaagattgttatctgagttgatcttttgaaggaattccagagcctttgcataacttaatcttgagaggccctagcaaaccagtaggtttcatggctgagaaagaactgcttaggtaatggttcatttagacaactccagataaggtgtggtttgtgtaataacaaaggatgcttttgcaaagttcagtccatcaagattgaacacccacccccacgccggggctgctcttttgctaagcctgaatcatatttttggagtgactcttttccactgacctgcgcaacactgacactcaagcccactcttggtctggctgtccatgaaaaaaactttaaactcttaattggcttaattggcatggttgttgataactatctctagtgaatcactacagaacaatagcaacaacaaagatcaaacaaacaaaacagaacacctactgatgcctgaaaccaaaaccagccttaggggcaacactagagacctctgacttcctaagcgccacagttaacgtccttccttcctcctgctcctctgtctcttcctgctgctcccttccctccccctcttgcttctctccctctctgcctcttccttctgctccttttctcctcctcttcctctctgcttttctctcctcctccgcctctcctgtcttctccccctcttcctcctcctgtcctctcaccctcctcctcctctcatgtcttccttctactcctctcgctcctcatgttggtaaggctttgcttcgttatttgctgagacagtgtccctgggtagtccaggttgaccctgaacttgcagccggcctacttaatcctcctgaatgctgcatgcaaggttgttttgtttgtttgcgcctttcttggtttcacgcatgctttgtgtgggtcatcagaaacagtcgagtgtggtcgtgctgcccagcactgaggaggcaaagaggcagggaatcattgccagcttactgggctacattgtgagttctaggtgaagcagagctgtgtcgtgagattcggtcacaaacaacggaagcagctggggcaggaaaacagcctgggtttagagcagcccacaggggtggcagggagtgggcggcgctaacctcatagactcttctaattgctgtgggccgtgtaaactgggcatcatgtgacacgggggaggcggagtctgccggacactggagcaccagttaacgactgcttgtgagagacgacagtattctcaactgtggggccttcatacctgccacacaggcatgggtacgtgttacccatgtttgtccctgacaaacagctcaagggagggaggaagagttcatcctggttcaggggttgagagggtacagtggcccatcatggtggcgagttgtggaatattagttgaagatgtgttacttttgtttatgctgtgggacatttgtttaatgatgcaaagatgtgttgcattcttttcctgctgcatttgtttaactccgtgaagctgtgttactttgcctgcctaaaacagctgattggtctaataaaagagctgaacagccaatagctaggcaggagagggggagggggggggctggcaggtagagagaataaatagacggagaaaagccatcaaggcataagaaaaggaggcgagaggacaccagtggccagccacccagtcacacagcaaggcaaggagtaagaagtaaagaaaggtatatagactagagaaagataaaagccaaagcaaaaagtagctggggtaatttaagaaatgctggctagaaacaagccaagctaagtaaggccaggcattcacaagtaagaataagtttccgtgtgagattattttgggagctgggtgtctggcccccaaagaatacgtgtaaacagaaaaaaaaaaaaaaaaaagcaacaacagaggtgccaggttgtgccttgtgatagtaggggtcaggtccatctagaaagttcctttactctgtcaaggaacacttgtccaatgcctaagttgcatacactgggctttggcagtgagcagaacagactgtgttccccgactctgcagtgagcaccatgagtttaaagcaggtatttatgtgtaggggtatgtgtatatgtaagaacgtatgtatgtgtatgttggcatactcgggtgccttgacacatagacagaggtcagagatcagagatcttggtgtccggtgcccttatccactggaccatctcaacatctccttaaccagctctttggttattacaggcaaagctgctctgaacttagagagctgcggatttcgggatttgctacaaagccatcttttttttttttttttttttttttttttttttttttttttttnnnnnnnnnnnnnnnnnnnnnnnnnnnnnnnnnnnnnnnnnnnnnnnnnnnnnnngaggctgtcctggaactagctcttgtagaccaggctggtcttgggctcacacagatctgcctccgagtgctgggattaaaggcgtgtgccaccatcacccggctccatcttttttttttttttaaagattttatttatttattatgtgtacaacattctgcttccatgtatatctgaacaccagaagagggcaccagatctcataagggatggttgtgagccaccatgtggttgctgggaattgaactgaagacctctggaagagcagccagtgctcttaacctctgagccatctctccagcccctcctacaaagccatcttaatgtccatcaggaacctacgtaggtgattagtgtgcacggatgtgcacgcttagcttcctaagtgtgtgctcactgtgcaacgaattgggtttcacagtgacatcactgcagaccacaggttttgattagcattagcatattttgctgccctctcttatctctctccctcccctttcacacccttggtagttcccttgtgctttcatagtcccacaattcaacaaatgagagacggactcagtgctcatctaaatgcaggttctttgctgtgctctccagctctgttcttattgcaaatgacatcatctcatttttctctacggttggatgacactccattgtgtgtgtaaatacacacacagacacatagataaatgaactgcctttctttatctgttcatacaccggtgggcatcgaggctgtttcccatgacttggctgctgtgacgagagcctctgcaaacatgggtgtgcagctctattgtttgtaccgatgttactggaagtatcccaggagtagtacaactggtcatggtaggatttggggcagggaaatgagagcagacaccaagacttgctgcgtgtgagctctgggaggctttttgttcgtttggatttgttttttgagacagggtttcttcgtgttgctctggctgtcctggaactcactgtgtagacaggctggcctcgaactcacagagatctgccggcctcctcctcccgagtgatgggattaaaggcgtgcgccaccaccacatggcttgaggactgggagttgtactttagttctttgaggtacctcaatgttgagttccatggtagctgcactaattttattcccaccagcagtatagggctcttgcccaccatcctcaccagtatttgttgtttgttttctttcttttcaaaggacttatttattatttgtgtgtgtgtgtgtgtgtgtgtgtgtgtgtgagagagttagcgggggggggagagagagagagagagagagagagagagagagagagagagaggagctgcacatgccacagcaaacgtatggaaatctctcctacaacgtggggatcctgggggattgaactgaggtcagcagacttgactgtgacagccattacctgctgagtctcctcactggccctttgaaactatttattattgtgttgtgtgtgatgtgtgtatgggcatgtgccagagcacacacgtggagggcagagggtggctttcaggactagaccctctcctcccaccacgggctgctggattgaactctttacctgttgagccagctcccttacttattgccttcttttctctctttgtttaaagactattttatgtgtatgaatgtattgtctgcatgtatgtatgtgcactgtgcgtatacctgctgccctcagaggtcagaagaggggtcagagtccctggaactggagttccagatggttgtgacccaccatgtaggtgctgggaatcaaacctgcgtcctctggaaaagcagccagtgctctcaacttctgaccatctctccagccctcttgtcttattattctacatgggtgattgtctatctagctcctttgtccatataattaattaaaatatttatggatatgtgtgtgtgcctacatgtgggaactgcacatgagagtgtggctgtggaggccagaagaagaagaaggcttcagatcccctggagttggagtcacaggaagttgtgagccacctgatgtaggggctgggaagtgatctcaggtcctttggaagaacagggagccttctcagctgctgagccatttctccagtcctaaattaatttttctgacagtgctgggaatcgaaccaagggcctttgaacttacggcaatcctcttgcctctgcttcccaggtgctgggatcacaggtatatgctccacactcagctcacttatttgcttctctatttatttatttatttatttatttatttgagccagtgtctggctgtgtggctcaggctggccttgaacttggggacttaggtgctgtattagtcagggttctgtagaggaacagagaacctatagagtaaatctatatctatctatctatctatctatctatctatctatctatctatctagatatatagcaagacataggtatatctatagagatatagaatatagatacagatagatagaagggagtttgttagaacggcttacaggctgtgggccagctagtccaacaatcactgtctacctaaggaaggtaagagaatccagtagttgctcagttcatgaggctggatgtctctcagctggtttttagtatactttggaatcctggagaagtaagctcttgatgtttttgttttgagacagggggtttctctgtggctttggaggctgtccaggaactcgctctgtagaccaggctggccttgaactcatgaagatccacctgcctctgcctcctgagtgctgggattgagggcatgtaccaccaccccgtgtgacccttaagcacacagctggtgaggccttttcggatttgatagtgtcagccacagacttcctccttcctcttcctcccccaacccaacagccacagtttccacttcaaccaccacagacttccaggttttgcctggaagctagcttcttttctgttttctttttgacaatgtctcgcgctgtgtagacacagctgaccttaacatcacagagactgcctgtctctgcattgtaagtattgagattaatcttttcttttttcagggggctgagagggagggttgagacaaggtttcctgtatagctcaggctggccttgaactcataatcctgcttcagcctcccacgcttgagaggtctgtaataattgtctctcttgggaactgccagtcttcccatctcttggaggaggcaccaatgcctcttagcagtcatcattcagaggctggtgagaaaagtgtgggttcccgagtgccagcgagccaacctcacagcaggctccaaactccagtgaagtgggtggggcagttctcaggaaccgaaagacagggattcagcctttgtttctgacgataactgaatattaaacaaatcacaaagcttcgaaccttggccaccaaatctgtaagttgagaacaatcatacccacataatcggggcatactcacatgcagagtcttttacagtcaggaggctcaggggttcagtgtcagcttggctacatagtgagtttgaggccagcttggtctacacagcaagttctaggacaatcagagtgacacggtgaaaccctgcctcgaactgacaagcagatcacaaannnnnnnnnnnnnnnnnnnnnnnnnnnnnnnnnnnnnnnnnnnnnngaaaggaaaagaggagaaaagaagaacccataaagtttaagagggagaagtggggaggccaataagatcaaagcagccaccagccaaggcagaaggaacaatcccttttagctgtttatccgaacacagacaagcatcatttgccatgctggtgcagcaaaacccaagcttggctatcagcgtgtggttacctactcttgagtctcctacccatcagacttggggcatgaagaaaggaagggagtcttccaaaataaaggaagaaaagaatcaggcccacctggagagttaggagggctttctggatacttgggagtcagccagagcagggttcaggacgggaaagaggaggggcactgagctgtggggcaacaagggccccgtggaagaggtgatgggtatcaggggaggctgcagagggcttggaccctgctgcagactctaggttcagaacctgctacaaactcgaggactcaggacctgatgaagactccagtgtgtttagatgttggtcttcctgtggatgggctaccagagatcttggatgccatactgaagaaaatagcatgtttagatgtaagctaaattacagggcaagggtctctgaattgtgctgaatgtcccacacagggcatgcatgtggataagatgacctctggagaatgtccgagcctgagtttactgaatctgctgtgggctgggcatcagattcttgtgggctgctctgtctgtcctgcctgctcttccttcctctcccctttttctccgagctcactttatctctccagggtctcatgtatcccaggctgggcttcaactaattatatagctcgaggatgaatgtgagcttccaaccttcctgtctccctctacctttcatatggagagatcaggcagtatttgtgggttggtttgtttgttttgagacaggatctcactatttatctcaggctggtgttgaagaagcaattcttcggcttccctggtacgggattataggtgtgtgccatcatggttgggtaagtctttgggttatctatccttcatactgtttcccatacaactgtattagtcagacatgatggcattaaccttcctttctgcctgtaagtctgagaagggagaaaaccatttgagccctgaagctggagaccagtgtgggcagccccatctcaagataaatacaaagatgaaaatgaaccaactctaccagttccgtttctttcctttacagtttctctttctttctttctttctttctttctttctttctttctttctttttttcctcccttcctttttttggatggcctaggagctcacagagatctgctgggctctgcctccagagtactaggatcaaaggcatgttccacctgtgtgtgtgtgtgtgtgtggtgtggtgtgtgtgtgagcgtgtgtatatgtgtgcgtgcatgtgtctgtgtgtgtctgtgtgtgtctgtgggtgtctgtctgtgggtgtctgtctgtgtgtgtctgtgggtgtctgtgagcatctgtgggcatctgtgggcatctgtgggcatctgtgtgtgtataagaggtcagagattgatattgagtttctttccccatcactttccaccttacttttaagaacaagttttctcactgattctttagctcattcatttagctggactggctgggaagtaaacttcagggatccccctgtctcagcacccccagccctggtgtcatagatatgtacatccagctttttatgtggatgctgggaatctgaactggggtctctatgcttgtgtggcaggcacctcactggctgaaccatctccccagcccaacctggctttcaagtcatgattctccttctccatgcacctatctgtacatgctgctacagctggctcatgctgaccatttggtaactgagcacaggaatgtcaaattgctcttctcagctgcagaactggccaggggcaggctctctcttcacacagcagggtgcattgctcaggggtagcctgcattctctctcctgcctctttaggcccagcttctctaaggaaggtactcctagccgggactcacactgccatctacttcaggctacaaaagcactcacactgatgacgccactccagcatggcaactatagctcccatgaggagggcatgattactcataactgaaaaaaatgttatcaaaagaagtggagttgcttgtcaaaggtcagagcctggtggcagaactcttcagacttacatcttctgactctgcgtccagtgctcagccttaagttaggcagctgatgcagccagcctcgacctccacgaacttcacaggccagagctggctcttggctgctgcctaggaaaatgctcttcagggcttagagagagagagagagagagagagagagagagagagagagagagagagagggcgttacacagagaagtaaggcgttagcatcgatttccttttgttgagcaatggtttccgccatctggacaggtgacgtcagctgtctggatttcagccagggttctgtggtttaggagcccaggaaacagacttccggctagcagggctctgacctggagggaaagcctctcaacttgcaaagacaggaatcacactcgagggaaggtttcactgcaggttcagtggccaaggggaactgggggtgggtgggtgttctgcgtgagggggcaggaccttcagcaagggaggagcatttcttcatcgcagaagacttttgtggctaatagacaagtaaattgggagtggacgggaggaaaggtaagcaaagccagggtcgcctggaaaaagacacacacgcactgaaggtaaacacaggctgagaatagaaaactgatccccaccctggtaagctttgcaggaacaccaaatcctaacagactgagctgggctcctgaataactttacctttggaatttcaaaagtgcagctcttagacactaagcaatgaatccattaattaagcagaaagcttagctatgctcactccccactttggtcttcaagctggtccccaggtctggttcctgaacggggttactcaccctggcccttgctctaatttcatctcctttggtcctcacggtgatggtgggagggaagaaacatgcttttatctagttactttttttctttctttcttgagacaaagagttactctgtagcccaagctagcctcaggctcacaacaaagctccatcctgcctccagcctatgttttcttaatgcagtaagcaccggtaagtgtaagtgacattacagctgtcctcatggagtgcaaccctcagcagacccaccccacttttgcgctattacagctcctcacccaggaccctgaacatgcttgcacagagctctaccattgaacgacatccacgctccctttttttaaaacttaaaagttattttattttatgtgtatgggtgccttgcctgcatatatgtgtgtattcactgtatgtgtacctgaggaccagggaggtcagagagggtctcagatcccccagtgttacagatggttgtgagctgcctagagtttgctggaattgaactctgatcctttagaagagtagccagtgttcataatcattaagccacctctccaaccttggacttgaagagcctcctgcctcaacctccctggtgctgggacaattgccatatgtcactgtgacaaacaatttgcaatttgctctttgtttgtatttttttgaagattttttttaaaatttatgtgtatgtatgtgtctctctgtgtatatgtccacatgtgtgcaggtgacagaagaggccattggatcctctggagctgcagatcattgtaagctgtccagtgtggatgctgggaaatgaactcaggtcccctgaagagcagcaggaactgttaactattgagccatctttccagtccctagtttgccttttagagggtaaatgaaaatttaacaatattcacagaacagtgtagccattgccacagttgattttagaacatttttattatccacaaaagaccatatgcagagctgagtgtggtggcccatggctgcagtcccagaacttgggaagctgaggcagggggattgttgtgagttggaggccagtctgaactacataaacaagaagccctgtatttatacagagtcacaggcagtcttcacaagtcttttcctctctagttctaggctgctacagatctgtgtattcagggtgtttcagggatcatccatgctaagagtgtgcaccccccacccccacccccggccctgccacttcttcatgtttcccttctggccatttgtttggatgatggttcattttcacggttggcttgactgggttacaatgatcatgggaacacacctctgagtgtgacaatgacggtgtttccaggaagggctccatgaggagggaaacaccctgaaagtgaaccgtccacatgctggctctggattgaaagaagagtaaattgggcagagcctcctgactacagacagacacaatgtgaccaactgcctcatgcccctgccactttgatggactgaatgacatccacattttagctaccatgttaagaacgctgctctgggaattcttacacactttgagtgaaatgtttgtttctcttgggaggggaagtgacatttctacgtcatctagggcacgtggtaattccaagtccagctttttgaggaaataccggcttttagagttcactacataatattcccaccagcaaaatggaatgtcccccctttccccactccctggtctcagaacgtagcccatgctggactgtaacttgtgatcatccctacctcagtctccaaagtagccccatggtagacaccagcataatgctcagcttgtccatttgcaaactgaagtacttgagccaggtgacacacacctgtaatctcagcgctgggaggtagaggcaggaggatgagaagtccgaagacagacttagctacatagcaagcgggaggctagcctgggctacctgagacccagtctcaaaaacaaacaagcaagcaagcaataaatagataaatagaggtattcgtattttttgttgaatcgcaaggattcttttgtttgtttgttttttgttttgttttgtttttttttgagacaagtttctctgtgtagctttggagcctatcctggcactcgctctggagaccaggctggtctcgaactcacagagagccacctacctctgcttcccgagtgctgggattaaaggcgtgcgccaccaccaggcttgcaaggattctttcctcccttctttctccctttattatttaatgtctgagtagttttgtttgtttgtttgtttttgttgtagttgttgcctgtgagtatgtgccagcatcacatggattcagtgcccagaagagggctggagttacatttgggtgttagcagccgtgtgggtgccgggaaccaaatctaggtcttctgcaaaagtggcaagtgcttttgactgctgtagggttttgtctgtggtgtgacatagggttagtgcctttccttcacatgtgcgggtcccattgtctcagcattaatacacttggtttttttgtttgtttgtttctataattttctttcaagacagactattgcactttatgtagcctagaactcgcagtgtagccactcgcagactggcctcaagtttgcagtagtccttctgcttctgcctcttaaatgctgcgattgcagctgcaagctaactcttaaggatcataacgtaacaaaaagggtcacccttgttttttctaaccgttgcccgcccctccgccccccctccccccagttgctcagtgttacacacatgaaccatgctcaggaatacagtgactgaaccaacacaggcgtgttggaggctcagcgaagtaaaacatctgtgtgggtcaggcttctgggaagtgtcacatatgacccaaatgattctttctctggagatcaggtctcacatagcacaggctggcctccaactccttatgtagccgaaggtcacttgaactcctgatcctcctgcctctgcctcccaggtgctggcattacagacgtgggcggccatgcccactttgtgtgctaccggggcttcctgcattcgaattgtgctgattgcacactctacttactgagccccggccccagtcctcattcatttgatttaaagctctttcacacctaagtttctgatgctttcttaggccacccaaaaccctttgccacaagactccagatctccccgaaactctgtcttccgtctcttgatgtatcaggacagagattcaatcttggtgagccacaaactcctgtcctttctgcgtccccctcccttctcctccccagcctgtacgacaaagctttggcttccttgtatggtgttctgttgctggaaggttcttctgggtgtgtgaccagagctacatagaatgccataaacccctgtgcttgttgttacccatgacaggccttgttctgatgctgtggcattcagggtatgcagacagattcaagcgctctgcctggcgggagtcgaggccttgggtaagccaacaccctgtctgcggcacggtttccctttttggacatagtgtctcattctgtgtatcatctctgagtagagtgaagccaggccacatcagccacagctgtaaaaagtctatgcagtggggcctggtggtgtgtgtgtgtgtgtgtgtgtgtgtgcgcgcctgtgtctctatgtgtatatctctctgtgtgtgtctctgtgtgtgtgtctctgtgtgtggtctctgtgtgtgtgtctctgtgtgtgtgtgtgtctgtgtgtctctctgtgtatgtctctgtgtgtgtgtgtctccatgtgtgtccaggatcaagtggagcacagaggacaacctgtgggaggtagttctcaactcccaccatggtgtatactatggattgaattgaagtcatcaaacttggtgccaggtgcctccgcctgttgagtcatatagccaaggggaaaggagggtttcaagaattctacctcttataaggaggatgagggatcgaccttggaagaaaaatagttgtgctcagaaaaataaaaagtgggcatggtggctcacgccactaatcccaacactcaggtggcagaggcaggaaggtctctgcaagttccaggccaacctggtccacatagcaagcaagtttcaggccagctaggggtaccaggagatcctgtcactcctcaaagaggtccctctgacaccttgccaggactaagatcagactctttctattagactttttggaaagcagttacttacactccaggtatcttagacaaggctgggcgctcacagctcctgagctatctgactatggtctttgccggcaccctcagagcaatcctacaggtagttccatcaactcattttggcagaggaggcagctagaacttgcctcaagtctcagagtcacaggtattcaagccagagctttgctgtgtcctcaaagttcacaacgtgtgtgtgtgtgtgtgtgtgtgtgtgtgtgtgtgtgtgtgtgtgtgtgtcaccaagctgactcagaggtcagaggtcaactcaggtactgttcctcaggagtgagacagaatctgtaactaagacccagggctcacagattaggtgaggctgtctggccagtgagcctaagggatcctgctgtctttgtttctatcttcccagacctgggattaaaggcgagcgtttctcatacctggctgggctgcttctgtgggtgctggggattgaaccgtggtctttgtgctgtgtggccagcagttgaccaaacgcaccagctctccagccannnnnnnnnnnnnnnnngcagttcaccctctttctaaggcccagcgttcaaggagcagggtgcaacgaccctcttcctcccttcacttccagtgggttcgttacttattttctcaagaaggagccagctcagaccagctggtcagaagatgtgtttatacaacagggttgatgacctctgtgaatcaggggtctccatccccactgccggatgatttaccaagagcatcatgaggctttctctcggacggtaaaaaccacaacagagccttgaccctttggcccagatgagcacttgagaggacagggcccacacctagtggtcacaaagagctagttgcagaccacactaggagagacacatctgttaggaagggaggaggtgtgtgcacaggagagagactcagctggaaagcactggctattacataggaacaaagtgccaaggttttagtcatggggacttcctggagaggcattgaaccttgtcattatggtctgtctttcaaaagagaagaggtattctgggagcaactacaaaggtggcctgtattagggtaaaaggggctgcacacacaggggagggctgaccgccccccctcttctgaggagtgactctggatgtccagcctgagattttgatgtgggagcagtttgcaatcagtctccactcaggactgcactccagatcctttctgccagccaggtgatgtccctgcagtgacagggatccctagaacaccagaggctacagggtctgtggagagcagaacccccagagctctgaatttgcttcgggttgtcagcatttggggactgcaggcaggggaatcctgggtcagtgtagatattgtacaaaaggagtggcctcagggagtatctctgtgtggatggcaagccaggcttgagttgtgacagggcccctgaagttttcttgacctttgttttagtaaaaaacaaaattgctgggtagtggtgcacgcctttaatcccagcacttgggaggcagaggcaggcagaactctgtacaagaccagcctggtctacagagctagttccaggacagccagagctacacagagaaaccctgccttgaaaaaccaaaataaatatatagaaatttaaaaatccagcttttgtgtttgtttgttggtttatccaagacagggttttcctgtgtagctttggaggctgtcctggaacctgctctatagagcaagactggtcttatacagagatccgcctgcctctgtctcccgagtgttgggattaaagacgtgtgccacccctattaacacatttaacatgcaaatgttctctctatttactgtttgtgtgtgagggggtgtgggcgccacaccacacacagaggggatggagggcaacttctaggaactggttctctccttttaccatgtaggatccaggcattgaacttgggttgtctgacttggcagcgggcacttctacctaataaatggctcttgcttttgttttgagacaggctctcactatgtagcccaggctggcctggaacttctgggtgattctcctttctctgccttctgagtgctgagatcacaggtgtgtgccaccatgcctgtctctctgtgcacagcagctctgcaggcaccaggaacacttaagtagcttgttcctcaaggctcagaaggaaagtgaaagcgaagggttaaacgataggtaagcggtgatgtggttcacaggtcaccccaggcaggctcccccagtcatcaagtgtacctccccacccccattgccccagggactgaggtagatggtgacaggagcttccagccctgtggcctccatgctgtccttcccagaccccttcagtcctattcccagacgtgtgacccctggatgcagtatatacaaaagagccacctctgactccaggtcacccccacacagtagggagtagagtgggtacggtcacccgttacagggtcgctgactcttgagatgcagttcaagtggccccaggattggtcgggggtgccagagctgtgcggctgatgtgacatttgggattgattggttctgtctgcagggaggcactgctgttgctaaccctgcacagaggtgggcagggacagacctctctggggaggaaagtgttctgggcctctctgtgttattctagtcggttagacagaagccgataaggagcctggtgtcactgtgctccccacatgcccgtcctatctgctcacccaccaagctgactcagattttctggggtgccaggtgctacaggagacactgaacctggcagtgaacagcgtactaccacactaccagatggtcattcggaggtcacagggtggcgaaagggctccaatgcataactgaaggtgctgtaaaggagagtgaggggtctgcaaggaggctccaagttttgttctggtgacaagcaatgacattaaaggtgctgtcacccagggaactcgaggactaaggacacaagcaccggaggccctgctgtgtgctcagagaggataagggagcctcagaagtgtgtaagtggtaagccaggcggtggtggcgcacgcctttaatcccagcactcgggagacagaggcaggcggatctctgtgagttcgaggccagcctagtctgcagagcatgtgccaggacaggctccaaagctacacagagaaaccctgtcttgaagaaccaaaccaaaccaaaccaaaacaaaaaagtgcatgtctctatgagtgtatgtgattatgtacagactgtgtggacttgtatgagtgtgtttatgtataggtgtgtgtgtctgtgtatcttcgtgtgaatgttgtatatgagtgtgcgtgtctaagtatataatgtggtgcagctaaatttattttagattagtttatgtgtatgagtgttttgcctgtaggcatggatgagcgccacattcatgcagtaccagatgaggccagaagagggcgacagatccctggaactggagttctagactcaagtgagtcaccatgtgggtgccaggaatggaacccaggtcctctgcaagagcaacaggtattctctttttcaagtttttgtttgtttgttttgttttttgacagggtctctctgtgtagccctgctgtcctggaactcactatgcagatcaggctggcttcaaattcacagagatccctctgcctctctgtctcccaagtgctgggactaaaagtgtgtgccaccatgcccagtgcaaggaatgcacttaacagccaagcctgggccccaggtgtcctcttcctcctgggtgtgctagtaaatgttaaatgtttcccttccggctcaagcacagcttcacaagccctttgtgttctttgcggcccctgtgtaatgaggcttggtaaggagacacacttcactggaataactcgctctgacacagacttctcacaggatttgactgggagtcgccacttaccgtggaatgcctccccttctcaagcccctgttgtcgtttcctggtcctgtgaaaggaagagacgtatagagctagggtcatggctcagtggctgagtctattgtgagcaaggctctggggcgtcgtgttcggaatattacagtcagtaattacagccaccattatttctcttcctcaaatttgtgtcccaaaagacttcagtagatacaaggaaagacacacataggataaatcgggatgtggctgaacagtacactagtaaatcatgtgcatagctaataagagacacactctgggaagtgactctggagtctgctactgagatgggctcagggggttaactgcccgcagcccctcaaccccactgtgtgtgtgtgtgtgtgtgtgtgtgtgtgtgtgtgtgtgtggtgacacaggctagcctcaaacccactgtgtaggcaaagctggtcttggcctcctggtcctgcagcttacaccacctgagtgctgggataacaggaatgttttataatctccacgttcttgccccaagcttaccaacaagatacctttgttcagggagtgcagactctgccagccctgaagcccacccctttatacccttttggatgctagagcggttgggacctactcagtcaggggacagacttggggaagaaaagctgacccaggctcgaccttcatgagatcctgggagagcgatgcagctctccaggttttctgggttttttcccctcgttgtgtttatgccgtttcctgtttgtgttttctgaccacatgttaaccacgcatcgtccctttctcttgagttttacatattattctgatgaatgtttgagctgagcagaaacatttcctgaagcaatttctcaaatctctttccaaatgtccatattaatcatgggatgatggagttggggcttccatcaagatcaaaatgtccgtctttggtttaccctgattcatgggtcctaaaatctcatccccttctctggtctcctaatgctctaatacggtgttagcaaccgctgtgttgacacaaaacaccgttcttgttcttggagatagcttattctagcccaaatataagtgatcatggcccaggacatgggttcagggtgatgagaaatgacatattctgtgtggaacaggccgtcgaacttcaacaggcacagaacaaaagaaaggcatttaaggaacatattggtggggtcatctggtaggttggttacagctgagttggagaatctttgctatgggtgatcttggctaccagccgctgatggcatgcttagctggagttggtggtttgctaagtttaaacattctggaagatttacctgctagccacaagatgttaggtcagacacagaagctggtagctgatggcttttaaggacactaaagacagggtctgcaacattccagcttccaagacttcccgtgttctggtcagtcagtcaggacacagggtcttcttcagagaattcaggccacagctttttttttttttgggggggggttataggttccccaaagaagcaaagtattttttaaggttattttattttttactttatgagtgttttgtctccatgtgtgtctgtgtattatgtgtgtacctggtgcccacagaagccaaaagagggcatcagagcccccaggatgaaattacagacggttgtgagccactgtatgggtgccaggaatcacaagaatggagccatctcttgaagcaaaggctttgaaaggtggtttctcagctgggcatggtgtcgaaggcctgtatatgtaagcacacgaaaagctgaggtagaaagattgagttgaagttcagtctagggtacacagcaagacactgtcaaaaaaaaaaaaaaaaaaaaaaaaggaaaagccaggtttggtgttacaagaatttagttccagcacttgggaggcaaagtcaggcaaatctctatgagtgagttcctggccagcctggtttacagagtgagttcaaggccagccagagctaccctgtgagactctgtctcaaaagaaaaagaaaaacaagcaagcaaaccgaaagggcacacgagttctcacctgtgtgttccttgcgatggaagtctagtacagtgagtgtgtgactttggaaacttgacgtttctctttgcttcgatggtctgtgaagacctccgtagagctattacaattcaggtaggaacagaacatcctggccgggtatggttgagagatcaggcctttcagtccctcatagcagctccctcagcgtccttagtgccggggttacaggtgctcaacactgtactgcgggacgtaattctagatatgactgtgattgcttgtggctactgaggtaaggactgttgccaactacagaagcagcctctctctctctctctctctctctctctctctctgtgtgtgtgtgtgtgtgtgtgtgtgtgtgtgtgtgcgcgcggtgtgtgtgtatgtgcgcgcgcgcatgtgtggtcagaggacaacttgcaggagtcagttctctccttccacaccaagggtacctcagatcaaaccctctgaaccacctgggctgttggacctcttttcttgaaggttccaaatggatggtgtgaatgaaggaccgagcctagcatgtgccacgtagtaagaactagaaatgaattacactgagacagagaaagagagagggtgttggcaaggggggggggggggggggggggggcctgtagcccaggttgacctctaggtgacattttttacttcttttaaaaaaaaaagattttttgtttgttttttgtttttttgagacagggtttctctgtatatctttggaagctgtcctggaactcactctgtagaccaggctggcctcgaactcacagagatccgcctgcctctgcctcccaagtgctgggattaaaggcgtgtgccaccaccacctggccaatgtgtgtgtatttttatgtgagtattttcctggcttatatgtgtatgtatactctggtgccccagagtccagaagagggcatcagattcctgggcctagacttacagacagttgtgagctgcccacatgagtgctgggaactgaactcggctctctactagatctggccagtgtccttaaccactgagccacccctccagccccctaggtcataatatctgtcattctgcttatcttaccctcttctggtccctgaactaaggagcttcctcttggtatagattagcttgaccgaccaacttcctcttcgtgtaacaaccaaggggaaactgcccagagcgggtgcaagcttggaaagaccttgcggtcttgggcagataaggtgtgactattacttttcacaaaaacagcaagtgagtctcagagagaaaagccacttaagaatctccagggggaggtgagaactcagaggagcatttgtgtcccggacaaggtttatctgttcaaaatggagttcccagatacaaatgcctgcaatcccgactactcaggaagctgaggcaggaggatgagttgaggccagtctgggaaacaagacagaattgccagtggtgctgtgcacctttaatcccagcaggcagatggatatgagctccaggccagcatggtccacatagggagaccttaccctgcccctgccccccagagagagagagagagagagaaggcaagggaggcatttatgcgataatttacagttactacagaggggacagactggaggtaatatttgatagtacttagcaccttttgtttggtttggggtaggttttttgtttgttttttgagatagtctcaggcaatccaggttgttctcaaattcattgtgcagctgaagatgaccttgaactcctgattttcctgcctccacctcctgagaactgggattaacaatgcatggcatggagcccaggttactctgtgctgggaaatcaaacccaggtctttgggcaagctaaggaaatgttctaccaactgagcaacaaccccgccctctttgcattttgagacagagtctggctttgtagtccagagctctgccaactctgattctaaggcgccgggcaacacagtccccgcccacagacctctgggtcagctgtcaacttcatctagaggcaggagcagaccgaggcctggtgccttctttcgtacgtgcgggttcacaatcaccaacaaatctgttatgtcactagggccttcaagatggtgacataggcattttatcacttctctttttcacatgtaaggtgtgccacagatgtaagtgaaattatgtcatccaccacatggcccctccctgcaggcaggacaggattcctgttgagctttcccgttttcaaaaacaagtcatgtgtcttccgttgttgtttttcccagaaagtgtcccagctcccaaacaccagcgaatatggtatcctcagtaattacacacaatttaaccccactctcaggctgcccttgaactcctaagctcatgaggtcagcctccttagtgactggaagtataggcagactccacggttatgggtccttatcagttgtgttctgaagacagggtctcattttgtagctgtgagtggcttgggactctctatgtagatcaggctgactttgaacttgcggagacctgcttgcctctaactcagtgtgctaggattaaagatgtgccctaccacatctagcctttgccagatttgtttaagtacattcccagaaataatatttctttagtaggatatgtgtatatagttcttctaattattgccaatccctcctaccatgtgcattacctcttttgcatcccaccaatgatgccctagaggtctggtccccacagctttgccagccactcttgcttacaggctttgagttttttccaatctgatttgaaggacacgatactaaagctttgtatttttgttgttgttgttgcttttttttttttttttttttctcaagatagggtttctctgtggctttggagactgtcctggaacttgctcttgcagaccaggctggtctcgaactcacagagatcggtctgcctctacctcccgagtgctgggactaaaggcgtgtgccaccaccgcccggcaagctttgtatttcttattagaagcaagacccatctctttttacgggaacatttgtttgtgtctctttactttttggagctgtacatatgtccggtgtgttagccccctgtctgtgatgtctgtttctcatctctctaggcatgaaaacctgagttccatgtctgggtctcacacagcagagggagagaaccgattcctgcaggttctcctttgaccgatacaccatcatggtatgcgtgcccctcctccaataaataaatgaaagtttttatgtagtcagatttaccagggctacagctatagcttagtggtagatcagttgcctaccgaacatgaggacttcggttgattccccacaacaaaacaagcaaacaaaacaagcaactccatattccccctcagacctgacttttcaaccacgactgtgaaaatccccactccaagccacagaggaatatactccttatctacagtgtaaagaacagattgtgtggatcccaccctttggttcactacaatgagctaattgaactttatctttctctatcagagtcccaagtttggcttgtggctcttcccttcctcccctcagcttcagtattcctggacaagatcttctcatcctggctgggctgaaactggacttgggtcaaaatcaacagaagcctgattccctgacttggctccatgtggctgtctgtttttctttcctggactctgtgctttctgtttagtgtttttccagccgttcacaggtgttctgaccttccgggcttgaggatgaggacactgaagacccatgcagggcgggactccactggaggtgggtcctgaagcccaagggtctcttccctgcttacagggttgggggatttccaggaaaagaggcttaaagtgtctctctccctctctcctactcccagctctcaagctggccacaaacttggtatgtagttgaggtgaccttaactcctgagtctcctgccgccactccttgggtgctgggatggcaggcatgaaccatcacacccttttcatatggttccaggaattgaaaccagggtcttctgtatgctagatgagcattctaccaaatgagccatgctcatcaaaacgaggcatagttgcctctaacctcagcattggggaggtagaggcacaaggaccaaggtccttctcagctacatggtaagtttgaagccagcctgcaatgcgtgaggccttgtctcagaccaaccaaccaaccaacaaacaaaacaacaacaaaacaccaaacaactaaccagcattagtaaggcatctattcttgtctgttggctggctagggttgtttccagaaaggaatggaagtttatatataaagccacacaattggtaggcagggccatgttgaaactcccacagtagcctgtgttcctacccagtgttccatctactgactaacctcactgactcagcagtgaccaccctgggttatagagacccacagccaggaagcagctgttagtggaagcctctattccattgccagcatggtgcctggaacacggtggcattccacacatatctgtggtttcccctcgttgtgtttatgccgtttcctgtttgtgttttctgaccacatgttaaccacgcatcggtgaagggtgagacctgtggatgaatccatggccccgaaggtgctcggcatttgccagatttcatggggctgaagactagatagtctcggctactgttctcctgtagcttagctaagacattttaggtacaagacttagactcctcagggtaggaataatttctattattagccaattactgacaacctggacatctagtgtgcatttcttgcttgatagtggtcttgttggttgtatttctaattttgtgtatttttttccttttctttctcctggaccatacttgatacttgttcttattatatatagttttgtattaggtttaggaccctctgatttagacaagaaggaattgttgtaggggcccattcagccaagagtctttggggaaccggcccattaaggtgtggtctcaggtgctatatgggaacagataaggggggcagaacagtgtgttctctctcctgggtggtggtcacagatctgattgcagccttcagggccccagggcagaagacctgggaggctgtctaccattgttgtatgagcattccccaaataagtatttttatccttttattcaggctttagtgggcttccctactcacccccacactcagcaggtggccaggaagcaccttggccattgattgtacagaaacggggttacatctaaagaaatgattcactgataaatgacccagactgtgctcacgttaggctcctcaggagatggggtactcttctaggatcgatgctgtggtaacacatccttacaaaaagagacttagcatgccaggcgatggtggcgcacatctttaatcccagcactcagtacttgggaggctgaggcaggcagatctctgtgagttcaaggccagcctgttctacagagtcagttccaggacacccacagctacacagagaaaccctgtcttgataagccaaaaaaatattcattttattcatttgtgggtcttttaaaaactattctacctggctggtggcacaagtctttgatcccagaacttgggaggcagagacaggaggatctctgagttagaggccagcctggtctacagagtgagttccaggacagccagggctacacagagaaatcctgtctaaaaatagccaaagcaacaagatttatttttattttctttcttggtctttcaaaacagggtttatttatttgtgtagcctgtaggcagcttagcaggttagagagtgtcctctccaagtgactcagttggtctaaacctcttagctctgctggtttctgtttcttcagggcagcgggtcagatctccagagtcatctctgcagctgggcttatttatgtgtgtgtgggggggtgactatcagcttttattgcttcctttggcagggcggggcctaatgaatctggtcagtttcagggacttcctgaagctctcttgagttgtttatcttcctgtttaaagagtctccctgaagtatacaatgtttcaatctcaggggacacttaaactataggctttcagaggtgcaccccaggtgggtcaccaaaaccatccaagccagtgccttccaaattcccaagaagaataagaaaacagtgagcagagagatgtagagttatggaggaaatgtgaggagactctccagagtgggaggggctctagggggagaacgctagtgtgctgccctgcctgaggggcttggagggagccttgcatcagggagtggatggagactggcatcatcgatttttatggtcacttttgagcacatcgcaggccgagccagttcacacatgcttcctaggcccaactggaaaagtcatcatgtcatcgttccactcagaggagagttcatggaagccaccaaagcgctcactacccatcacgtccttcactggctaagggacaccagtgtcaggacctgaattactgggctatggaaaggcaaagtgctaccccaaggttgaaaatccctgtgggattccttgtagcatctggagtcaatgtctccctccaggtattggcacccccagaattcttccctttcaccttcttctccatatgcttctcctcactccctccaaatatttccagtcacaaccatcaacacttttctttccatatttttctcctttttttccacaccaacatctttgtcccctccctcccccgcccctccccaggactccactatgtagtcgaggctggtcttaaactgaaaagcaatcctccagccccatgagcctcctgagtgttgggatcgtggacccatggccccacccagcttttctttggaggtattggcttcctccacactctcacccaggtccggtcctcacttttcttctttgcaagagcttttttttgttgttgctttttttttgttttgttttgttttgttttcgagacagggtttctctgggtagctttggaggctgtcctggcactcactctggagaccaggctgtcctcgaactcgcagagatcctcctggctcttcctcctgagtgctgggattaaaggtgtgtaccaccactgcccagcttgaaagataaagttcattttctacccattcccccatttctttatccaaaggtgggcaagcagggttggcgaggaccttgtatgcagagatgcaaccctggatggctgggagctccaggtgtggtgagagaccctgtgtcaaagcatagaggaagacacctgacatgacctctggcctacacacacacacatacacacacacacacacacacacacacacacacacacacgtgggctcctgcacacacacgtgtgcctgcaatcaggaacacacgcacacacacacacacacacacacacacacacacacaccacatagacacatgcaaaggaaagggggaatggatgctggatctgctgtcccccacccccagggctcccttccctgctccagggtcacagggggctaactctcaaagagcctagactttgctgtgtttactaacttttgggagggtggtcacataaacttccttgaactccatccatcagactttggttgcttaactccacgtttcctgtttattttctgggtttccaggatgcaatttgcatgtaattcaggaactgtgaatagtaagggtcccttgcacttgccaactggcctaatttttaggaatgacaattgttagtgaaacattcagaggctttgaatggatgggctccctgccgtgtgtgagcctgtgcccccacatcacagaaggggcagagagagggccagactctccacaccccttcctcttctttcccatgtgttttcatgtttcttttcttttgttttgtttttgctttcatgtttcaaaggtgccccaaccaataacaaaggccgccaggaggattggatcagtgccattctgcccatgaacttcagcagagtctggcaaacagggctgaatgcctgcctgaactcggcttcttggtcaggtcatgggctgcctgcccacaggaaggaaggagcccccatttccagctcacataaaagcatgaaagtggctccttgttgttaagctcttgtctgtctgccagctgccggtgccagcacggacactcgctgtgtaactgtctctgtctgtctggagcctcacgtatgataagccaagtgttcaacctcttagctaacaccctgccgctcagtagggtgtggtggtcccctcctgtaatccttatactctggaagcagaaacaggaggattgtcacaggtcattgcattatttttttggttttggttgtggattattgaggcatagtcttgtgtagcccagactgacctcaaactactgtgtagctaggacaggccatgaatgcctggtcctcctgccttcacctctcaatcgctgtaattacaaagcaactgatacaaagggactctgactgaggtagggccacaaagtgagacggcggggagaaaaaatgcagcaacacagcccgttacgataaccacaaagatatatatataaaactttttttggtttttcgaaacagggtttctctgtggctttggagcctgtcctggaactaactcttgtagaccaggctggccttgaactcacagagatctgcctgcctctgcctctcgagtgctgggattaaagttgtgtacctggcctatgtattaatttattaaaggatgctatggggaaaacagactcaggaatatagaacaaaatataaccagttataaagtccttccactctgcccaagggagctgggaacggaccacatgctgttcacaccagtgtcttcacaacaggagagaacacacatcctcggcctagtctgtctccttttaagagatcatgtccacaggcaagaagtcacgccctaaggccggtgccccaaagctattggtggagtgaattctcacaacaaagacagacaccccaacactctcttgctctcagtaggcataccctgacttttcctggaagctgttgtctcttggggcgttactgaatatccccttcttacttttttttcccagtgtttcagatgacccagttgtgttggctggttttgtcaacttggcacaagctatagtcattttgggaagagagccttgatgagaaaacacctccatgactggtaggttattgccttgatgagtgattgatgtgggcggggccagctccctgggggtgaaataagttgaggacacagcttattcctttgagacagaagttctctgctgagtatctagttaggggcgctgggaacattccagcccagctcacacagcccatgtatgtgcttctgcaggtgtgtaccctcggtctccctcactttaactttcggtgggatgtgacattttctgacgctggtgccaacttttgtggagccctgtgcacctgcatcgcaactggcaacctgagtcttaggactgaatgaaacaaatgtgtcttaaattatgatccaaatagggactgggagcctcacacttagtggcagagtactggtcaaccaagcatgaggccctaggttcaatcttttgtgcagaaaaccaaagacacggggtgttattctgaggaagtggttgagtggttgagagcttgtatttgctgctactgtaggggccacaagttcaatccttagcacccacttaggtggggtagcttaaaaccacctgtaactccagctccagggggatccggcacctctggcctccacacacacataattaaaataataaaaataaatccttaaaacaacctaatgtaggctatggtggcacatgtctataatttcagcatttgagaacggagcagaggctcgaagttcaagatcacctgggctatgtggtatgttttaggctggcctgagctatgtaaaaccctaattccaaaaacaaacgaaaaacaacccaacaacaacaaccaaccaaaaataatacctgcagggcagttggaagaatgtgtggaagccacatggaaagccctagtcggtttccagtagcaaataaaaccaggtgtggtggtgcccagctgtaatcacggcaccgtggaggaggcagaggtgttaggataaagctcgggggaccttggtggattccatggcaggagagggtgacccaggtggagggacaaacacgccaggcagacagggcttaagtgagttttattagaaagggaagggaggggaaagggaagaggaaagagggagggagagagagaagaaaggagagagagagagagagagagagagagaacagaagagaagaaggagacaggaaaagcctgtctgctctagggaaagcgagcaggaaggagacagagggaaaagacctagaaagagaggagccggaaagagggcataagtgggcagaggtttttcttttaaaggggtcctttgcacctgggctgaccagagtactgcctgagtgcattctgccaggtgacaggggcaggccagtacaatgcctgaatccttacaggcagagcatgcatttgagaacagcttggagaacagacttataaaaggacaaaacccccaacacaaacaactggttaagagcacttactgctcttgcacagaggacctgggtttggttgccagcattgaggttgtattttacaaccatctgtgactccagttctaagagatctacttccctcttctggcctccagggacaccaggcccatacgtggtgcatatatacatatgcaggcaaaatgctcatacatgtgaaaaattaaaaaacaaaatttagggctagtgagatgactcaccagagtgctaactgaacaagccggatgacatccgttcgaacaccagaaccccacgtcttagtgttctacagctgggaagagaccatgaccaagacaactcttataaaggaaaacattgaattggggctggtttacagtttcagagttttatccattatcagcgtggcaggaagcatggtttcgtgcaggcaggcatgatgcttgagagcagcagagagacctacatctctattggcaggaagcaagaatgagccactgggcctggcttgggcttctgaaacctcaaagcccacccctggtgacacacttcctctaataaggctacatctaccccaacaagaccacgagtcccaatcctttcaaataatgccactccctgagagggctatgggggacattgtcattcaaaccaccaagtaaaagtggaagaagagagacaacccacaaagttgtctctggcctttacacaatctgtgtctactccatcatgaaaacgcacattgtcagtcaggcggtggtggtgcatgcttttagtcccagcactcgggaggcagaggcaggcagatctctgtgagttcgagatcagcctggtctacaagagctagttccaggacaccctccaaagccacagagaaaccctgtctcaaaaacaaaacaaaaaaactcccacacattgtcatcattaaaaaagagttacaaaaacaacaaaaagccctactataaaataaataacaccatataaggaaagtacttaacaggtagtatagtggtgaaaaaaagacaaaagttatcagttatttaacattgattcttaattttcaacagcttcatagacgtacatataatgtattgtgatcatattcacccgttaccttctcttatctcctcccacacaccccttcttcctggctttcctcctcctttcatatcttgtgtgtgttggtgatcagagccgctgtgtgctcatgattacaatggccataccgtctccagaatactgatctcacagcatccttcctggtcctccatcctccatcccctctctcacactgtgtctcctttagggcagactgcaatgaaatatccaccccgcccacacctgtagcactgaccacgcccatttgggcacggtcactggtgaggatgtgttgaggagagagtttaggtctggggtctgggcaggtggctctctcttgcagcctgattggatccgtagagtggccatctgcttcttttataagtgacttctcccccaaataaattatatttaacctatatttgagcctggtcctgtaaatcattatccgtacctccacagcagaccatccaataatcccttaatctcagcacttggcctagttatgggtctctgctttaactgttgccccctgctgaaaaagattcctctggttaaggcagagtgcagcaagcttttttgttggctgccagttcacaaataacgacccagaaatttattaattatgaatgctcggccctagcttaggtgtgtccctcttgctcttacaactgaaatcaacagctttatattgatctaccttttgtctctttatattgatctctaccttttggcttttacctgtctgtttgcccggctccctccatgcctcattggcatcccacgaatgcctagattcatcttctacttcctctctctcttcccagaagccccacctatacctcctgcctagctattcaccgttcagttctttataaatcagtcacagcctttcagctctttattaatccaatcacagcaatatatcttcacacagtgtacaactatcccacaacagataagagctgaactagtctattagaatgaacataaatatttagaaggcagttttactacctagccatttagcaaaacatctatgatggcttttcccctgttgcctgtgacctccccaaccacaggattttacccaggtttacagcactaggtgtttatttcctcttgtggaatccaagaagagagtggctggttacaccccagtaggtctgtactgtggcactcggagtccacatctgggaaagagcattggtgagctttcctccttaataagacgcatgcatagccccttctggcgctgtgaatgccagccagcagaaggatgcttccagtccagttccagcatcgtttctctgtgtctagtggagcgtgagatgtcttcagcaatagagtcttactgtttggttctgatgggcaagcaagagcagtgtccacagcctgaactgtcttgggggcctttgagggttccctggttagcaacccatagaaaagtatcccacacctaaaagtgggaattttggctttaaaacctgtatctgtgggagcatcaggcacctttgttgggtatctctctttaagctttttattgatttacttgtttttttccagttagcttataaaggagtaggttagtattcggcttcttcagatacctttcccccaacatacacctttctcctacaccctgatcccattccaggttaaaactttccaccctggaccccatctacaagccaccggagttatctaatgcgtctcacagcagagctcacggtctgacacatcagattaagccacagtcattgtgttgtctcagggaacagttattagagccctggtgcccacacaagggtcattgtattgtgtggtttgcagatgtgtggtcgtggaaagaactcgggctcggtgttatggaacggtggaatccctgctgcattgtctcatgacctgaggcggtgaaacagcccactctttacctatcattcatctgctgnnnnnnnnnnnngagaaatgctgagataagtgcgcgtggctgctcccccaagggcggcttgctgggtttcaccgcctcctcagcgacgactgttgtttctcagcagcctcctcggtcttctcaggcctctggtacctgagctggtccagaggcagaagtcaccctgaagcgtgactcctgagagtggagtggctatctggtacccaccaagcacaaagaggtgtgacgtcctcaagtagggaacttcttgttgttgtggtgacttctcagggaccgtggtgacttctcaggggctctaccagctccagattgccgtttccatcttcctttttttgggggggcgggggttgggtgttcgagacagggtttctctgtggcttttggaggcggtcctggaactggctcttgtagaccaggctggtctcgaactcacagagatcctcctgcctctgcctccccagttctgggattaaaggtgtgcgccaccaaacctaaaattttaattatttctattttttgaaatggggtctcttgtagccatggcttgcctcaaaactgatatgtagcccaggattaccttgaacacattatcttgttcccacatctcaagtgctgggattgtaggtgtcttccaccatgccttgtttaaaataagtgctggtgattgaacccaggatgttctgcatgctaggcaaacactcaacctgttaatccacacccccagctcctcttccctgcttatcaataagcaagagactgaaactacttttgtgagcttagttctgggattctaggaaatccccaaggggtttgcagtggtgagttgcttgtcagcatttctctacaactttcataggttgtctctttatctgtagactttctgttgagtatgagtagagtgttgctccctttagccttaggggatccaggttaggacagacttgcttttcttcttcttcttcttcttcttcttcttcttcttcttcttcttcttcttcttcttcgagattttatttatttattatgtatacaacattctgcttccatgtatatctgcacaccagacaagggcaccagatatcataacagatggttgttgggacttgaactcaggtccttgggaagagtagctgatgctctccatctctgagccatctttccagccccctgtttttttttgttgttgttgttgtttgttttttggatacagagtctaatgaaatgcaagctttccctagattcactgtatagctgagactggctggattcctgagactcctgcctccacctccatggaactgggcctataaacaagagtcttgattctgcccagtgatttccaacaaacagtacctcaaggaatatagtcttaaactttactttgctcttccaaattcaagatgaatgtcatacatagcccttgatgggtttcatcaggaggtgagcgtctctgccatgtgatgtagtctgcatctgagagctcagaggagagacaggaggacatctgcagtgtgacctgggtcattactgtacacaatcaagactcacatttcaccactgctgctatttcaaagttcttatcggataatggggaacaaagagggaagaaagagagattcattgcaaggatatttagggaactcacaaatgcttttgtatgttatttttcttttctgttaattaaaaatatcagaatcaggtatggtaggtggagacaggaactcagagctagccttagctacatagcaagtcctaggtcaggctagactacatgagagtgtctgaaaaaatactcagcctgtcgtttggctcttgccacggaccatggagtctgtgtatcagcctgcctgcagctttggttaaacgactatttgataagttatccctgtctaattgtcttcttttttctttgttgaggaggtgtcctgctaaagatgaccctgaactcccgattgagctttctcccaatcacagcgtcactaccaccttgttggtctgtgatagagaggtatcacacacaagaccagcccatctgcatccccagcccctgccatccgtcaccagggctgggtggccagccaacacctgccactagatggcagtgtatgtgtaggtggggaaaagccaacgccatcataggtgagatttaaatttattttatttatttatttattttggtttttcaagacagggtttctctgtggctttggaggctgttctggaactcgctcttgtagaccaggctggtctcaaactcacagagatccgcctgcctctgcttccagagtgctggaactaaaggcgtgcaccatcatcgcccggcaagtttcaatgtttttaaacttattttcagtaagttataattgaatacctgctatgaactgaggaagggtggcaaaggatatggaggaaatgtaactcggatctataatttttacttgtatcatggtttatcttgtttacaatttgcgtttgcccataagttctgcctggtttttgtttttagttctaggacaggctccaaagctgcacagggaaaccctgtctcgaaaagccaaaataaataataaataaaaagaaataaaataggagagtcagggtgcctcactcctttcccagctcctggtagtcagaaagcagtgtaaaacatttgtttctctaatcttcattattacagcatactaaaaatcttgtattgaagtttatgatttgccctatttggtgtgatgacaacttgcaaagcataatttaaacacaattagaagctaattgaaaatagaggttgattgtaaattttttaaaaactgtgaacccccaaggctgatagcagcgtcttttttggtgggcattgtctttcttagggagacagtatcgatgggttcctgggccaccagcaccatccaacccacgatgatggtgagacaaaaagagactgagtctgagccacggcttgtccacggggctgggggcagtggtgcagcctttcctgatgtttccttgtagtaatatttttttcttggctttaaagaagtaaatgctggcttgtaagaggcccacacaggtagcctctaagagctgagcagccggcaagaaaatagggtcttagagtccatagctccaggcgactgaacttcggccatggccagaacgaacttggaaaacacaagccctggacagattcagcatcagctgggcttggtgggtcacaagagtaatccaagaacttgggaggcggggataattgagagttcaaggccagccatagctacatggtaaatgtgaggccagtctgggctgcatgagaccctgcccccacccccaaaaaaagaacttggcgttattgatttcagcctgtgataaccaaaacacgatgaccttgtcacactgtacacaagtgtcccatcctcagaacctgggaggcaacaaatgagatatcacattttatcttctcaaagcagactagccaaatattatgttaacattcccccagccctggccttgtccctccctagtctccccgggtattcccattgcagtagaatttgaccttggctctaagtaaagttccttgctattgtttttttgcttattttgtaattttttgatgaaactcttctaatatgccaccatcatctcctgcttactgctatttctctgtgagatttgatctgtccttaggtcaccccaggagcccttgcattccctggaaactctcactgctcagtgacagaggccttctggaactccggctgccagtctgtgcttgtgttagccctaacccccacccatcctctaaggcgaggggagccagttccccgcctccaccagcctctaaggcagggatttgtgcccttgcactgggactgtgcttggccttgtccataattactcattaaattcaactaaaggttgcaatgtggggagaggtgacagatatatagccagtacaatgaattaaataacatggagataatatcccctggggtatggctcctgcatctagcaggtctaggcctggggatgaaaggtatggctaagacccacctgctccaggactcataaaggagctataagacaaactccagcaggggcctttcatcacctatcatgaggaaactctgaataattttcctagggacccattgagtcagagctcacacctagttaggcaaggagtgggtgtagccaggtgactgttttcttggtctcaacacccaaacatccaactatttgtggaccagtaagggaagtcccctatagtcagtaccctgacactctctaggttctctcttgcacaagcagggacaggcaggttagttgccgaagccggaggctccaaggatcccttcagttctcacactgtaaaggagttagctggcttctctcagggagatacagaattcactgtcctgctgtcctgggcctggagatccccacagccccgttagatatgaggaagttggggagagaaagaggggccacagggatggctgggtggttaacattgctctctgctcttgaggaagaccaaagttggtttcccagctgctaggagccagagagtcttctcaggcttccaatagccctacataaacccacgtgcaaacacatagccttaagaatttagaagttgggggctgtagagatggctcagaggttaagagcactgattgctcttccagaggtcctgagttcaattcctagtaaccacatggtggctcacaaccatctataatgggatctggtgccctctctgacaggcaggcacacatgcagaagaagactgtatacacactaaataagtacatacattaaaacaaaaaaagaaagaaattaaaagttgcagggtggtggtggctcacgcctttaatcccagcacttgggaggcagaggcaggtgaatctctgtgagttcgagacctggtttacaaagtgagttccaggacagctttcaaagctacacagagaaaccctgtctcgaaaaacaaaaaagaaaagaaaaggaattaaaagttgggttgggggctggagagatggctcagcagttaagagcactgactattcttccagaggtcctgagttcaattcccagcaaccacattggctcacaaccaccttgaatgagatctggtgccctctgctggcatgcaggcagaagactgtatacataacaaataaataaaatcttaaaaaaaaaaaaaaagtttggttggagagatggctaggtggttaagagcactggctggacacaggttcagttgccagcacccacatggcagctcacaaccaccagttccaggagaaccaatgcttcgcttctcttctcttctccacaggcatggaatgcacactgtatacaacatacaggcaggcagaacactcacacatatgaaataaaaaggaagtgaaagttttgtttaatttttaagtgtgtatgtatctctctctctctctctctccccccccctctctctctctctctctctctctctgtgtgtgtgtgtgtgtgtgtgtgtgtgtgtgtgtgtagttgcccacggaggccaaaggtattgaatacccctggagctggagttaaagatggttgtccgatgtcagacatggatgctgggaaccaaaacctttagaataaaaaaagcaatacatgcatatatgctctccaccattgagccatctctctggctccaagaggtgttttgttttgtgaaacatagagagggagggtgttattcttttgtttaaaaagaagaaaagagaaatgctgagatatgagacataagactataagtttattataaggcccagcagaatagggagactaagaagaggaacaggggtaaatggctgaccgccatggccggtcgccatagagagagcgcataggtgagagtagagaggaagctaagaggaaacagagcgggaaacagagaggggaacagagagagggaacagagagagggaagagagagggaatagagcgagggaacagagagtgtaaatgggcaggagcctatcttttaaaggggtcctctgcacctgcgtgcagacttctttcccatggaaccttgggctgaccagggtattgcctgagtggattccaccaggtaacaggggcaggccagcataatgcctgaacctttcaaatagttctttctccctgagtgtagatttggttttaccagatgttataggcacctgatgtcttgagttcacctttatggaggactgtactcttgtttgttgagccaaaataaatcctctatcctttaagttgctttaaagggtattttatcacaagagtaagaaaagaaacttaaactattattaatactattattaatactatcaccttaaataaaaatactatttttcctttcatctttctttattcaagctcattgtttcatttgtttcttgctccaatattaatgagaatgtcacagtgtaataactcaatagagaaaattatatataagcataatgagataataaagtaagatactacattaggatctggagagatggctcaggcataaccagcacttgttcttgaaaaggataagagttcaagtaacagtagccatatagtggcttacacgtctttaaataaactttcagaggttctaatgccatctgatgacatccttggacagaaagcatgtaaaaagcattaacattttaaaacagacagatttttttttggacaatgaaaagcatcttaatcttgaccttgtnnnnnnnnnnnnnnnnnnnnnnnnnnnnnnnnnnnnnnnnnnnnnnnnnnnnnnnnnnnnnnnnnnnnnnnnnnnnnnnnnnnnnnnnnnnnnnnnnnnnnnnnnnnnnnnnnnnnnnnnnnnnnnnnnnnnnnnnnnnnnnnnnnnnnnnnnnnnnnnnnnnnnnnnnnnnnnnnnnnnnnnnnnnnnnnnnnnnnnnnnnnnnnnnnnnnnnnnnnnnnnnnnnnnnnnnnnnnnnnnnnnnnnnnnnnnnnnnnnnnnnnnnnnnnnnnnnnnnnnnnnnnnnnnnnnnnnnnnnnnnnnnnnnnnnnnnnnnnnnnnnnnnnnnnnnnnnnnnnnnnnnnnnnnnnnnnnnnnnnnnnnnnnnnnnnnnnnnnnnnnnnnnnnnnnnnnnnnnnnnnnnnnnnnnnnnnnnnnnnnnnnnnnnnnnnnnnnnnnnnnnnnnnnnnnnnnnnnnnnnnnnnnnnnnnnnnnnnnnnnnnnnnnnnnnnnnnnnnnnnnnnnnnnnnnnnnnnnnnnnnnnnnnnnnnnnnnnnnnnnnnnnnnnnnnnnnnnnnnnnnnnnnnnnnnnnnnnnnnnnnnnnnnnnnnnnnnnnnnnnnnnnnnnnnnnnnnnnnnnnnnnnnnnnnnnnnnnnnnnnnnnnnnnnnnnnnnnnnnnnnnnnnnnnnnnnnnnnnnnnnnnnnnnnnnnnnnnnnnnnnnnnnnnnnnnnnnnnnnnnnnnnnnnnnnnnnnnnnnnnnnnnnnnnnnnnnnnnnnnnnnnnnnnnnnnnnnnnnnnnnnnnnnnnnnnnnnnnnnnnnnnnnnnnnnnnnnnnnngcaaaaagatctggcagaaataaaaaatctggtagacaggtttgctggcacaggccgctggagtgggcgtgcctacaggtaggtcacatgaccaaaacgtcggggaccgtaagccgcttttgtctgtttacctgcttgttggataaaaccagaaaggttcctctatgcatttcccatgggtgaggcaagtggaaaaccagcaaaaagctcctctccggatgcacgtcttcccgtgggagttgccaggggcctggccccgaaggggacacagctgtcccgaaaccgaaaaaggacccagcggtctgaactgaaaaagcaaaaaagcaccgctcctggagcgggatcccatgcctgaccttcaggaaatgcacccaacaagtgaaagaagaaataaaaagcaagatgtcaggtggcagtgcttgcctgtgtaagtcgttgaagtgagtgggcaggcctaagctaggtcacctggttatgaccaagatggcggcccccaggttagcccacgttgggcgccaaaatgttattcttttgtttaaaaagaagaaaagagaaatgctgagacatgagacataagactataactaagaagaggaacaggggtaaatggctgactgccatggccggtcgccatagagagagcacataggagagagagagagagtagaaaggaagctgagagggaacagagagcacagagagcgtcaatgggcaggggcctatcttttaaaagggtcctctgcatctgcttgcagacttagttcccgtggaaccttgggctgaccagggtactgcctgttccaccaggtaacaggggcaggccagcataatgcttgaacctttcagagggaaggaaggggagagagacagagagagaaggggggagagggagggagggagaggagggggatggaaagcttggaagggctgcagaacagagatgaaagtcattatgtaaatgggattcaccgtggcagctggagaggtcgaggtgtgagggcagacagcggaccaacggaggatggagcccggcactcgttgtgggaatgaagagagcagagagagagagagagagagagagagagagagagagagagagcattagcacaatggatggcagtggtttatgatactgtgtatcagtatcaatgtttcagtagggggaagggatggcatggtgtaataaaagtgggttgtgggtggatctgaggtgtgccagagaggaaagagaagtactcgagagtgtgacagacacggacatgttcctgtctgggaaaagtagttagcctggaacaagagagactcctgaggctgaaaactctgatgagtctaatgtggtttgggaggcatcaaagaggcccagtgccttcggttgggcagcccaaggcctgcctgatgtcctcggttgcatggccaacaatctgcctgatggcttcattcctgttactgtgagaaaaataccctgacaaaagcaacttggaaagaatgtttattttagttcacagatccaggttgcagcccatcatagcagggaagtcacagagggaggaacttgagagaagtggtcacatcacatccataaccaggaagagagacagccaggatctcctgcctagggaacggtgtggcccacagtggtcaggtcttctcatcgaataataagactaacatgcctactggccagcctgatctaaacaatccctcacttaagctcctcccacaagcgtgcctatgggccagcctaatctaaatccctcacttggctctcctcccaggtgattgtagactgtgtccagttgtcagctaatgctaactgtcacaggatggcccacccttggaatcctgaagcagggatctttgggatcaaggtgggaagggtgctctctgtcccattctgggtgaagctttactgcaggtgacaaacccataaagccaggccacgagggaagagggaagactggcctccctcctgttgggatgagagaatccaatcggtatttctccatgctaccgtcctgacgtgtgccgtgtatccacaggttatgcccaggcttggtgccccatacctgtaatcccaacacttgggaagtagaggcagacaaccagaagtttgttggccttggctacacagtaagtttgaggctagcctgggctacatgagactctcatctaaaagaaaaaaaaaaaaaaggaacaagacaaggccgggcaggactctgctcctccacagttcctcctgggtgtagctcccttgcccatttccctatttgcttcagaggggtggaagtggggtgtcatgggaagtgtgccggttagttcttttgtcaacttgacacaaacagggatcatctaggaagagggaacctcaattgagaaaatgatcctaccagattggcctgcgggcaagtccacaccgaagtttccagcccatagtgagcggtgccacccacggccatgtggtcctgagctgtctaaggaagcaggctgggcagccagccatggggagccagtcagtaggcagtgttcctccctggcctcagcttcagatttcctgcctcgatgtccctctgtgacggactccaactgtatgatgaaataaaccctttcctcctcgggtggtttttggttatggtgtttattacagcaataagaatctaaacaggcagagcattggtggctcacgcctttaatcccagcactcgggaggcagaggcaggcggatgtctgtgagttcgaggccagcctggtctccagagtgagtgccaggataggctccaaagctacacagagaaaccctgtctcaaaaaacaaagaaacaaaagaatctaaacggagacagcagaccacagtgaagggtagagcccttaatctcccatactgcctcatcctatctatctagaggccctcagtatgaaataacgctggcgtgacttgtccttgttgagctcctagcgccccctggtggccacatgcattgttttttgttttgatactatgtagccaggactgctgccctgaatcttgtgtttctcatgccctccagtctcccaagcgctgggacaacaggtgcacacctccatgccctgatacattttggatctcatttgaaggttgccacagtcacactaagcccacctccacccctccccacccccggcctgtcctctgttttctgtctgttgtatgggactatgctcgtggggagttcagctgttgccctttgcagaaggatcgtcccagccgagcctgtgtattgcccatggaggggtggggtcaggagaccctcacctgggtatccaactgtctcgattgctcgtgccctgggggcgggaactagagtatataggccaggaaaagctgtgaggcggggcatccgttttgcatctggctatggagaagaagccttcgtcatcacaggtgggtaaaggtttttccaggggcggcctgttgcgggaagagcacccacacttctgtaagtaacccctcacccgtgctctgtcgggaggccattggttgcccagagtaaaccttgggggagctgtgtctgtcattggaccagggaagaggggtcgaccttgggaagtcaaagctctgctccccgcagcttcccattgctctcctgcctcttcacggttccacggtgatcactggtggtcactggtgacccagggtcagttctggcttgggtacttgtggagaacacctgtggacattctttcctggggtcgtgctgtgattccccaccgttcaccgttttccagtcagataccacgcttctctgagggctcaaggctgatcagtctcgcacctgaagacaatgaaccatggagtgtgaggaaaagcccctctctcttttctttatatttaatgatgtatatctgtctgtttctgtgtggcacatttgagtgctggaagggcccatagacgccgcaggaccctggagctggagttataggtagttatgagctgtcgctgtgggcgttggaaattcatccgattctctgaaagggttgcagatgctctaaaactctgagccatccctcaggcccctttccttttaaaatcagggtctcatgtagctcaggatatagcttagaccagtggttcccaaccttcctaacgcggcgaccctttaatacagttcctcgtttttggagacccccccaaccacaaaattattttcattgctatttcataaccttatgaatgaattcatatgttatgaattgtaatgtaaatctctgtgtttcccagtggtcttaggtgacctctatgaaccactggcttagatgatcttaaactctagatcctcctacctccacatgctgggattgcaggtgtgggccgtggtgtctggtttacacagtgcgagggatagaacccagggctccctgcatgtgaggtaagcgctcccatctatgctacagtcccaggctcttttcatagccgatttcgttcatggcaagacccagcttcctcactttttccacccagcatctagacaggaacacggctaatgccttgtaacgcttcccgatgtggggagtgctggatgctgatgggaaagggagtgactctaaaacaacacattagtattttcccttgtggcaaagtccctgctcaagcaagggaagagcgaattgtatcggtctaatttattgcggccgctagagggcagcactgagtcaaggctcagactaaagaaactgaccaccagagaagcacattccagcgcctgttctcggcgccttggcatttcggtgtgggtttctgtccatcacggtgcagcggtgagggttgaaatcctttccttggtgggcattatggtgcgcgtctatgattccggcagcccggaggccaagcaaggaagagtccaaagtgagttccagacagtttgtgtccagttcggacaatttagcagaccctgtctcaaaataaaaagtgaacaaaagggctggagaactggttcagggatgtactgctctttcagaggacccgggtttggttcccagcacgctcatatcaaactctaggggcatttgatgcctctggcctccacagcggcctgcactctcatgcatggacatacgcacacacacacacacacacataattaaatatgcacataattaaaatcataaaaataaggccgggcgggggtggctctcacctttaactccagcactcaggaggcagaggcaggtggatctttgagttggagcccagcctggtctacagagtgagttccaggacagccggagctacacagagnnnnnnnnnnnnnnnnnnnnnnnnnnnnnnnnnnnnnataaataaataaataaataaataaatatttaaaaagtgaaattaaaggggctggagagccaggggtggtggcacacacctgtgatcccagcacttgggagaaaaagagagggcctatttgagttggggggcagtctggtctacacagcaaattccaggcctgccagaactggatacatagtgaaacactgtctcaaagcaaaagcaaggtcggtgggatgagagggtgggtactggttggagctaaagctcagtgttgaaaggctgtcggttgtttagcatgaattaggccatgggttcaacctccagcagtgctaccaatacatggttaggggtcaggaggggtgaaggnnnnnnnnnnnnnnnnnnnncagcaggaaaaggtgctttcggctaggctaagctagatgatccgagttcaatcccagaatgcatagggcagaaagagagaactgactgctgaacactcagatctctacgcttgagctgtgtgtggcgcatgcccagtagagggtgtcagattgcccgcagctggagttacaggtgggtgtgagccatcagacatgggtgctgggaatggagcttgtatcctctggaagaatagcctgtgctcttaaccttcccgccatctctccagcccctaagacattttcttttactaaaataaccttttaaagttaagtaataaatctttctctgaggctctctattctaaggaccacccttgcttgctgctcaagtataaaaagccccctggaagaggaaagatgagctattgatggctgtgagctgactgtcaccgtttggccctacttggctaggaattgtgcataggcaggcggaagctcatccagaactagcaaccccagcccttgggtgcccagggcttagaacctattgctccaggcattagaagccagaacctagggctgcaaaccctcaggccagagctttgctgctctgcactttaacccctgacatttagcagcttccataagcctctgcttcctgatgcagctgccagtgcttcgacagggtctctctgtgtagccctggctgtcctagaacctgctctgtagaccaggctggcctcacactcacagagatctgcctgcctctgtctcccgagtgctgggattaaaggcgagcaccaccaagagttggtgctgcggctcttgaagcagccttgtgtgtaggaacctgggttttatgggagcagagttgcagctctggcggctgagtgttgggactcccttgtcaccgacagcagctagtatttataacccctgggcctcagtaccaggaccctcaatccttccagctcctcagctcctttgaacgctcatggtgaccagggccccccgtttctcttctgtggctccccacagtctctttctccagccttgttctcttcttccaaggccactcattcctagttgctgtggaagtggccattgccacccctactgctgctgctgccaggagggcatctcctcaccgacccaagaattgagtcggaagttggatgtggtgacacaaaatagcttactcggctgcttgttggcagtccttcagtgaagataaggggacaccagagaaggacccgacagctgtcatgtagggggtcaagtcaccccaatatcttagcatatttaaagggaaaataaggtctaccattaatcccaactgggttttttctttctttccttctttctttctttctttctttctttctttctttctttttaagtcacattttcccaactgtttctttttgtgcatgtggtggtcaaaggatcagtgagttctccggcttggtggcaaatgcctttacccctgagtcatctggatggccctctagagctctttaatggtgtttaaattgccttaaggatgcttagcttctactctagtgccccaggcacaggtgggtccctaatctgtcctaacctttctttgctctgaacttgtctctactaaatcgtgaatggagtgaagagggcaatgtccataccatagcctgtgaaaagtgcggactgtcttacgggagtctaagggtgagtggaattgacccctgagtgtcagccagctccttctggttacacatgacacagtttagtgtgagtcaggtgtgggttatgtcaagaaggacactgagggaataaacacctctaaaggttttctgcttctatgtggtctatagtgagttccaggccagccagaccatatagtgagaacgtgtgtgtgtttgtgtgtgtgtgtgtgtgtgtgtgtgagagagagagagagagagagagagagagagagagagagcattttgcctgcatgtatacagcctgtggaggccagaagagggcattggatcccctggaattgaagttacatccagcacgtgggtgatgggaactgaaccagggtcttctgaagagtagccagtgctctaactattgggacatctctccagttcatttgttgaccttaacatcctgtctaaggtgttttgagaacaacacaaattacctctcagacatttgggctttatcttgactctcagctggaagtggcaaactagatcccagtatatggggcctcattccttcccccagggcccctcatttccctgtctttattttttaaattttgttttatgcacaggggtgtatcgtattcgtacgggtgctatgtggcaggcatgtctgtgtgctaacttgtgtggcccccagagtccagaagagtctttgtttcctctcatgcatcctgccatatcttgtagaataaggatcctattgttgtcccactctttcaccataagacactcaaccctgggaagggaacagtcaccaggacccttctgaagggctggcatcggcctgtgcctgtcccagactcaggtgaagcagcttggctgggactactggctcactcaggcagcttggaagcatctctcagggcaactgttctgtagcacagtgtctggaccacactgtgtctggaccacactttctccatttcatgattgcctcccatcactctctggtgatgggacctgaactgtgtccttacatacatatgagagccctttgcaaacagacattacaattttccccaaagggccccccataggcaatgtgcaaaggattccctgaaccacaggaggtggggacaaaagctgtcaaaagttgctctgtagaagagagggctaatggccagacatcattaagtaggttgctacctgtctctgagctttatttcagtgagagatggcaatagcaaccatggctgccgtgaagtttcctcaaggtgtccgtggagggctgccaggaagcaagggactgcctggctgacagtgagagaggcagctcggggtgccaaagctgccagctgccagctctcccagaaattcaacacagtttgccgaacactcagcaccgttctagagttgggcgagcgagaaagtacatgcctgaaaccccagcacatggaaactggagacccataactacatagggagttagaggcccacctggacttcctgagatactctttcaaaacaacaaaatcacccaacacttagaactagtgattttttttttcctattgatttgtctctggactagggtgccactttgtgcccgtcttggaggtcagaggatcacttttgggagttagttctctatttcctccctgtggcctctcggggtcaccaaatctgatggtaagtgccaagccatctgacagcccagaaccaataatcctaactgtagtaaacttgctcaattgggctcaaccctgctcggtccccaggtaatcgtctctcctaaattgtttattgaatactctttcggtcctgttgtgttttctcacaacagtgttttgttgtttttttgtttttttgggttttttttggtgtgtgtgtgggggggggttgttttactgtgctgctctgggatcaaaggtgtgtacctccgggtctggttgtcccattgtttttcctcccttcctccctcccttcctccctcccttccttccttcctttctctttctttctttctttctttctttctttctttctttctttttttgggtttaagaatcagggtttctctgtgtagcttttggaacctgtcctggaactcgctctgtagaccaggctggtctcgaactcacagagttccacctgtctctgcctcccacatgctgggactaaaagcgtgcaccgctaccgtctagctctattgtttttctatggcacctctctgcctggctttttattccacagccacttgtttgaaatgagcatcatatcctagtaatcttttccaggtgactaagtctttcccaccgttgttttcctatgtctccaacgctgcgtctgactccggccttcacagtcgatgttggggggtcagctgctaatttctgcctacatggcaagaccagtttccaggttcccccttttcctctctgctctccttttcctcctctctgtttccggtctcctgactctgctgtgactagccccaagggcaggtgtcctggaggttttatttggcaactgggactcctgacctgggatgacccttgggaatgattcagggaactggaggccaggggaaatgaagcccaggtgtggctgaattgtccagtggaattcatagtcctccccaggcctcggtcccaggcaaagttagtaaggagttatttgtaattttcttttctgaagctaggtaaaagagaaatggggagaggcagatcctagctcctgatttgtttgtttgtttattttgaggtagggtctcctatatcctaggttggtctccaatttacttggtaaccaaagatgaccttgaacttctgaccctcttgtttccacttctttggggctgggatggctttgtgtggggctgggaattgaactcaggttgttagggctttcactgcaagcaccttgccttgctgagccatcttaccagccccagtctgtcttttgattgcttttttaaaagattcatttattgtgtgtttgcttgtttgcttgctttcgtgcattgcctttgcctttggaaggaagccagaagcccctgaaacctgagttttagacagctgtgagctgccacatgggtgcttggaatggaacccaggttccctggaagagcaggcaatgctctttaactactnnnnnnnnnnnnnnnnnnnnnnnnnnnnnccatccctcccgcccccccccagccccccaccccccctttttttttccttttctgttttgagacagagtctcactgtgtttctcctgctatcctggaagcttctatagcccagctggcttcagactcccagagatcttcccacctctgtctcctgtgagttaaagggatgtacctggccccagtgtacattctaaggtgttttcgtcaatattgagtctctcattgctctgtcttggaagctgctgggctaactgctcgggcttgttggcaaagtgtccatctctgcgtgtgttaattcctgcagctttaggctgggcattcaggaggcactttaacagcctctaatcacatttaaatcactttctccaggatcacgtggaaggcctgggagcagtgactggaactgattgagagaactgaggaagactgttgccctccttccaacctggaggatgaatctgaggaagctctgatcccgagggtcgtgccaacagtccctgggagtctctggatgtcatgtgtgatggggacctttcctccctcagaaactacatgctggccaaggaaaccaggttgcccccagggcgctgtgtggctgggttctaatagcccggtgtgtaaattgatcaatgtcgaaaatcctctttgacctagtcagtgattgcttccagaggcagaacgcaagagctgccctagctggatgcctctctgatgctctgagtatttctcagtggcacagagctctgggcaggaccctgaataggcggtgggccctcctctgcaacatgtgaaggcttatcttatccatgggaaacacatgcaaggatcctcaagtgtaaatgaaaatacctgaaaagaagctgtgtctggctgtcaacacaaggctcctggaaagaatatcatccttttttcttttaataaaaaaattgtatttacttagaaacattcagaatgtcaacaaaacagctgcaatttttttttgcaattacagagtggtattcagttaatagaacaatgatctttgtataagttgcatcagagacaactgaagatgaaaaaaaaaaaaccaaaaaacaaaaagctgctgtccccaaatatgactaaccaacaagaacctgctttaaattttcatgccaatttacaacccccagactgtgccaggcaaggttggtggctactgaaaataccaccaggacagggctacctaaagacatattcagtagtgtgttaactatacaaaaaaagacactgtacagtttaaaaacaaatcttacacagccttatatttcaatttttttctttaaaaaggagtgagttgtgtacaggggggttaaatgctctatagacaaaaaaagtttcgctaaaaccaacttttcgtacttcttcagcttggcagccatcttttcacagggctgcttgtcctctgcagcagtgtcgttcagcgttctcccagtttctttgcgacatcaccaatggacaagccagggcattcgcctttgattttttgggcggcactcagagcagaacaagaaggctgacggaggcctcttgggtgcattggggtccttgaacttcttttggtctcccctttggggggggatgtaggttttcttttggggggtggggttttaagtcggggtttctctgtggctttggaggctgtcctggaactcgatctgtagaccaagctggtctcgaactcacagagatccgcctgcctctgcctcccgagtgctgggactaaaggcgtgcggcaacaccactcagctgggacgtaggttttcatttctgtttcataatgggccttgtcagcctttgccatgtcttcaaacttccccttttctttagcagacatggttttccacctttctgagcacttcttcgagaactctgagaagttgacagaagcatccgggtgctgcttcttgtgttcctcctggcaggtttgcacaaagaacgcatgtgaggatttttgcctctcagcttcttaggatctcctttgcccatgtttagttgatttttgtggcaggcacagagtcgcccatcgcccgtcctgctcgcccttgcccaggcgctgtctctatggagctcaatgtaccacaatggctgtgagagcaggagccagactggaaggaattgctgtgtctgcagagactggtggaccaattggaatttcagtactgtagagaggtcgaattttgtaggttcagaatctaattactttatttgggctagttttagcctcctggaacagccataccttgtccactctttaacacctggcgataacaaataaaaacttcttagaagctattgacacagctgatcatcggcttcagcaatccaagagcgctccctgtctccatgtatctgcctctttggtgaacccatcaacatattttaaacttgtcttgatttatgactttctttgtgaatgaaaaaaaaaggggggaaagaaattaaaaagacacgactctacttaggtaaggtggaggagaaagtgtgttgcagataaaagggagagcatagccagaggcacatatctgggggaactcagagtggacatgaccctgacccaagccttgtgaggagagggaaggagccaggagagaaaagggtggacaagaaggccaggtaaccaaatggctgggttagagaagagcctctgggggaagggtggcccagcccctgggatggagatttctgggtagagggtgagggtgtgctagccataccctgtaacaggtagggactgagggatgctgggagaacctggcagccaggtctgctttgatatgtttaaataagcctcagtcatttgtcccaggtttgagacctagcactgttctgtaaaactataaaaaacgccataacatggaatttggggtgacaaaaatatgtgtttctgggcaatgaccacgaataatggctccagaataaactctcttttcttgtcgatgcaagagatgcctgaaacccagacagtaacagttcagtctgtatgatggtgcatgtttgcctgtctcaggcatgtctacctatgataactaattgtgtgtgtgtgtgtgttgagtataggtgtttgggggaggccagaggtgttgggtcacttaaaactggagttacagggttatgggctgctcattgtgggtgctgggaaccaaactcgggtcctctgcgagagcagcatgtgcttctaactgctgaacaatctctccagcccccaagttttttgtttgttaaagaaaggctttcatgttgccctggctggccttgaactcctcatccttctgtctcaatctctcaagttttggggttacaggaatgtgtcatcatgcctatcttaattgatgagttagctaccgcaagagattaacaacagctgatgacagaacagttagaacgctgtgcagtatagggagacttcagaactatggattgtttgtttctggaattttccacttagtactttctatcccgggctgacccagagtatttgaaaacgcggagatatggggcagctaatgtccagagggcgagcaaggcctggctcccttggcagggcacggcctcttggtgtgggcagtcttctcaaagttactttagacaacccgcatggccaggctgtctcctgcgcccgcctgttcagtttgttccagaggccggttcttcctggaactgggtgtcagttcaggacagagaatgctgggagtgaaacttggccccaaagggaagaaaagctttccaattgtgcatgagatcgcagattgctgagctgcgttgggcggggcttgcagttcctgcggaatgccaccaggagacgcgctttccacgcctcacaccgagaggtcacgctcgctcctacgtgtgtatgttgcaaatggcttttctaggattacagtataaagtcgtgattcagcttttccaaatgatgtattcaactcgagttacaagcggctctagttatgtaacgtgaccacccttgacaatgggctgggggaaaggagtggtaactagctctcactcttcaaacgaccttgggtcttcgcatttgctgtcagggtcacaggaggcccagcagagggagaagaggtgtgtggaagctgaatcataagctccagcttctggatgaactctgccactctccagaaggtaccatcagtggcattaattaagagctccagggccagcagggaactggggacacacgactttaatccaagcatttggattaaaggaggcagaggcaggcgcgatcctttgagatcgaggccaccctggtgtacagactgagttccaggacaggctccaaagctacacaaagaaaccctgtctggaaaccaaagcaaagcaaaaggttcagggccattggcaaattctccttgctcctgtcagttgttatagactagtgttgtttgactttcttttggggccttcaactcacacataaggacacggagacttcttattaattatgaaaacttggcattgtccccaactagctcttataagttaaattcatctgcttatattaatttacgttctgccacatgtatttttttttatctctcctccattctgtaagtccgacttggtccgcatctggctggcatctctttgtgcttagattcatctcctttttctctctattctctcctgcttagctattgacaattcaactctttattaaaccagtcagaagttgagttgactagctgggcggtcccagcactcgggaggcagaggcaggcggatctctgagttcgagaccagcctagtctataagagctagttccaggacagcctccaaggctacagagaaaccctatcttgagacacacacacccccaaaaaaccaagtgagacacatcttcacagtgtactggaagattatcccacagcacccaagggtggagctgccggcagtgtggctcagagtctgtccgctgacctgctgcctagcacaggcaagcagaggacatatgggtcagacagtgaagtgagggctgcagagaggccatgtaaggtgaaccggacccgtgggactggctagtttttatttaatggcatagagagcattatgtaacgctatatacactctgcctctgtataaagcacggttcaccccagccagggtcaaaacaagcaaggaaagcattagaaaccttccagcaagtctggaaagatttcagggttatggggctgagaaatcccccggataaggctgagagaatgttatgttttttctagaaaagtgccatccatgttcaatacagtgctgccagctcgtatgaggtggggtggggctctaagttgggagagaagacaggagatgatgtcctggatcctttgtggtgtctgtgaggaggacagattgaggtttccttgatgttcctggggggagaggctggctggcaggcagtagatgaatgcttatcttgtggcttttgccaagggtagacagatataggtcacagaaggtatgggtctcctcagcaggctggagccagcaggcacagctcatagttttggggacattcacagtggatgtgcagtaggatgcctgtgacctggagacctggggaccaaaggaccccagcatccctcctgtgtggtgttggcatccatcacctatccacttttctttccttttgttgagatttgtttattttatgtgtatgagtgttgtgcttgtatgtgtaccacatgtgtgcctggtgcccacggaggtgcaaaggtgtcgttgggcactctagaccaggagtaccgatagctggctgtgaaccaccatgtgggtactgagaattaaaccaggtcctcagcaagagcaacaagtgctcctaacctctgagccgtcactccagccctgctactccccttttcctctaaatggcgagagggctggagagatggctctgcgatgaagaccatggctatcttccaggggtcctaagcttggttcctaaacctacattgggtgctcacaactgtttgtgactccagctccagggtatctaactccttctggtttccatggacacctgcacacaggcggcactccttcacacagacacacgtgtaaacataaatttaaaaaagtctcttcaagcagaggcatacaagcaacaggaagtggtctgtttcactgggtgtggcttgagcaaatagagccctcaaaacctacctttacagtgagtggcacacttcctccaataagaccacaccccctaatagtgcctctcccttggggggggcattttctttcaaaccaccacaggcattttcttaattagtgagtgatgggggagggtcctgcccattgtgggtggggccaccccgggcaggtggtcctggcttctataagagaacaggctgagccagccatggagagcaagccagtaagaaacacccttccatgacctctgcctcagctcttgccttcaggtcctggcccatttgagttcctgtcctgacttcttaagacactaacagtgatgtggaagtataagccagaaaaaccctttctttcccaagctactttggttccgatgtttcatggcagcagtagtcaccctgactaagacagtcagtgactgtgtgaggcagaaaaaaacaaaacagaacaataacaaaaaaccttgaaaatttttagagatggggttgcttaacaaggtctcactgtacagtctccaacaactttcgagtcccaggctgttctcaaattctgagtaccgggattacatgtctggctaactctgaggcagcagcaataggagaactgagaaaacttctataaattaaaacctgattaggtggggttggctcttgcctttaatcccaggattcggtgtgtagaggcagggggggttaagtccgacttggtccgcatctggctggcatctctttgtgcttagattcatctcctttttctctctattctctcctgcttagctattgacaattcaactctttattaaaccagtcagaagttgagttgactagctgggcggtcccccctagcctccattacaggcatgttctgccatgaacatacttaggccctgtgtgttttaatatgcatggaggccagaaaagggcatcagatctcctggaactggatttgtggacggttgtgagctgtcacgtgggcgtnnnnnnnnnnnnnnnnnnnnnnnnnnnnnnnnnnnnnnncggaagagcagcctgtgctctcggctgctgggtcatctctccaggccctgtgtttttaagagtatgagagcagccaagagcatcacaagctttcagtgtcaaaggcccgtcagacagtaaaggtgcctagctccagatcaaatgcttttggttgcagctggtgaggaatattttaattttttggttttttttttttctccccaccactttctccctttcacccccacattcagcagaaatcagatcacagcagcttatttgacttcctgtttcagacatgaggcattctggggaaannnnnnnnnnnnnnnnnnngtaggagtctcttctgttcttggcatttcccttgaatgattttttttttttttatacagtctgattatgtagcccaggctgaccttgacatcatcacagtgatcttcctgcctcagtctcctgtgtgacgatagacttttgccaccacacttggctctttcttagggctggcaaagcagtcccaccctgctcggtagctggcctcccctgaggtcttgctggaccttgagctgccctgggctatggaagaggggagagtccaggatcttcctctctggctgtcctcaaagacgctgggctctctgtgtacttcccaccatgtgaccctcacaaggcactgcaggctttagcaaacaaaagcccctgtgaggcttctgagttctggcctcctaggcgaagggagtccaaagtcctttctcttggcttggaagttgtgggctgcagaggagggggtgagggtaaagcaaagtatgcattagcttcactcactcaggctctcaggagtctgttctctggtcagaaaaccgacttcccctggcactgccaccgtcgttgtcctcggccacagctgctgctgctgctgggtctatgggggtgacttcaactctgaactgaaggtacactatggagggtctttagaacattctcttatttattttttcttcattttcctggacaaagcctcatggctatgtagttcaggatgaccctggacttttcatcatcctgcctccgtttcccatgtgacatggttacgggtatggaccaccatgcttgactaggacacaggaaacaaacaaaaacgttttgcagttccagggacagatctctgggcccctgggaaagaagaattctacaggttccattctccgttcccaggcccccccattgttgtaatttctttttctttctttctttctttctttctttctttctttctcctttcttccttnnnnnnnnnnnnnnnnnnnnnnnnnnnnnnncctctattattaagagacacggtttctctgtgtagctctgtctatcctggaacttgctctgtagaccaggctggtctcgaactcatggagctcctcctgcctctgcctcacgagtgctggggttaaaggtgtgtgccaccaccacttggccctctttcttttttgattcagggtctccctaggtttcccaggatgactttgaacctctgggttcaaataatcctcctgcctcagtttcctaagaggctgggaatacaggtatacacatagcactttgccaaaggacagctttaaattgtgttttaattgtatttttagttatatatatttgtggctgactgagtatgggattgtgctctcagagtcaggaaggaggcctcagatctcccggatctgatcacaccgaatacggtgtgagctgctctggggtggggtgggggtgctgggaactgcaccccggtcctgtgcaagagcagcacaggctctggacatcggaggcattgctccagccccacaaaagacttgtttttattgacacctagtagggccagtgtggatcctgagggaaggaaagggtgaagagctaagaaagaaatgtgcagatgagacagaacgggagaaagagaaaaacaagtgaccgcagagggcaagaggaaggtggtgaggaaagactgagggacggtggcctctgcgccctgcctggatgaggctggcttttctagtcccgggggtaggaggaggctcctgtggcccccgtctttccaccttcctctgtccaagcgagaggcagtgttgctctctggcaccttcctcatctctctgacgtgtggagtgtgtggaatgctgtgctcacttctcacaagcagctggagactgagataactccctccctggaatctagagaattcggggtactgtggggagagagggagttggcgtcaaagcctctctgagctgtcagcaggacctggccaggacccatctctgaaagagatgggcagtggggctgggggagggaggatggcagtcttagagaatggtcccaggaatactagtacgcactcatgtttgcagggaccacttccccaaaagacagcaagtgggaaagtggtgccgaagctgcaagctcccaccatgctgtgcacttgggaactgaggcagggcactcagagctccccaagggccttcgtggtgatttctagtccctcacctcttagtcgagcaggcgccaatgtgctccgtatccttcaaagtagtgattctaggacagcattacccagaccaaggaactgtctctgagcggcagtgtctggggtgcccggtggtgtggggcccatctctgtcccctgagcggcagtgtctggggtgcctgatggcgaggagcccacctggatcagcctctgtattcggctcctgtcactcattttgacaagagtctctcacaaacacctccggtttgtgatccgcagctgttgctcaaactgtcgccttgtaacttgagactgaatgctggtcataagaaacacttgtcaatggaggaagaaaaatacgtttgtccgctgttgccgtctgaatcacgcatgtccccagaagctcacgggcttggtgtccagtatagcagacaggagtgaagccctttaggggggtaattggatcatgatttggtacctggcctcaaatttggtatgcctcggaggatgacattgaattccaagtctgctggcctctacctcccaagggctagaataacaggtgtgtgccatcttgtctgactgtggtttggttttttttaaacagcatcttgctatgtaacccatgctggactggaattcactgtccaggccagggagactgggaaatagggaagatttcctgcatcagcctccttaatgtgggacacatgtaccactgtgctctgtcgttgacttattttttctgtccttgacctcacaagtgcttggcaggctctcgaccactgaagtaaatccccagagatatttatttacttcctacagctcctttcacttttttatcttattatacttttatttatgttacacatgggtgtacacatacaccatagtgctcgagggaaagtcagaggacaacttttgggagtttgctctttctttccaccgtatgattcccagagattgaagtcaggtcgtaaggcctggtggcaggctcctttaccccctgagccatctctctgacccagactttccctcttttaaaatcatactttaggggggctggagagatggctcaaaggttaagagcactgactgctcttccagaggtcctgagttcagttcccggcaaccacatgggggctctcaaccatctgtgatgagatctggtatcctctgctggcatacaggcagaggatacataatatacataataaataaataaaatctttaaaaaaaatcatactttaggaagagcctcgagggaaagttctcagagcagagaccagtctctaaacgtctgtccttgagacacagggtgtgtctatgcccttctctcagtgaagaatcctgcctccccagggatcaatgtgcctgggtgctcatggctgaggacatcgtcataggcaaacttgagttcccatgtttagcctcatgctcaatgtcctcagagaccatactgcagtcagacaaacccaaggaaatgcacctcaagcccatacctcagaggagtctcccatgatgaccaagctcagtcaaggacacggacttgacccccacagtctgatgtggttagcacacgtctctcctcaaatcgcccacaggcttgactcacttgaaacagtgctgcagttcttgcagcaggatgtcagcaagcagctgggtggtggcggcacacgcctttgatcccagcctcaggaggcagagacaggaggatctctgagttcaaggccagcctgatctaaacagtgagttccaggacagcccaggctccacagagaaaccgtctccaaaacaacaacaacaaagatattattgtcaagcacagctatcttggtttgctaatcataacagaacttaagaaccatcttccagataagcagcacctcatccaaaaacaccaaatcgatgacaggaagataatcaacttgtctctgatattgcccaattgttcaccaaatctgagcatataaaggacctacaacatggacactggatgcctcagggacacatttttaaaaacccacctccaggacccattttgagtacattggaacagcgtggagttatgaacgataaagtcccatttattctactcccgggtttgaagaggctaagggggcggggctgacctgtgagctctgtgtgccaatcaggtaaaggagacaattttcccaatgtgatctttttttttttttcttttttaaagatttttatttatttattatgtatacagtcttctgcctgcacgccagcagagggcacctgatcgcattcagggtggttgtgagccaccatgtggttgccggaaattgaactcaggacctctggagaacagtcagtgcttttaaccgttgagccatctctccaccccctaatgtgatcttaatccaaggctttttcagcagttacttatgaaccctgtgatgggtaactgtagcatcctttcttgttgggctatctttggaccgccatcccacaaataatgacctggagatttattattaaatatgaaagcatggcctttagcttatgcttgtctcaactagctcttataatgtaaattaacccatattttttaatctgtgtcctgccacgtagcattacctctcttcagtcttatacctcttgtttcttttctgtgtctggctgacaactctgtcttttttcttccctctcttcctgcctggcttttggccatccagctctttattaaaccaatcagaaactgccttggcaaagatacaaaatctttacagtgtaaacaaatattttgcaacagggaaccacacagctttcccggagtcggtgagtgtcatgacagatgggcagcagttccagtcatcttcaaggtgcgttggatgaatccaatcaaatgctggcagaagggttctttagcccagactctgtcctgtccataactaggtgtatttctaaaacagttctgttccagtcaatgatattaaattcaagagagaaatacctgaaacctgtcatgtaagtctagagactgagcccaaaggggacaccacactggagaaaaagagtgagtctgtattttattttttgttttttgagacagggtttctctgtgtaacagctctggatgtactggaactagttctgtagaccaagctggtctcaaactcacagagatcaacctgcctctacctccagagtgctgggattaaaggtgtgcaccctgccccccccccccccatgcaggcaaaacaccaatgcggcccccggcaagattgggtctttatttatgtaaccacaaagggtttgatagggttaaaaatctaagagaaagttggtcacgaatcagctctttttatcagctgtgttaggtgaatcatcacccgaagtattaagtaaagtagtcattttatcctttaattggtatggcaaacattaagagggataaaggcatgagagggaggattgctgcaccaggggttggaaaagttatgccaggcaaagaactcccatcaagatcagaagtgaagtgaattaatccaagtgacggatgagaaaatctgatcaccagacatcacgaggtctggcaagacggcttctcctgggagcggagcgtgcagaaagatgcagatgatggaaaaactcccaaaggatacagggttacagaatatgagcccagagttataaacctgatgtcgaagtcggcctccccatgtgactaccattccagatgatactaagtgtattcaattgtggactggaaatccattgtcatgccgaccagtcttccacttctcacccaagagatttcttaagaagtaacaacacagcttacatgttctatagcacgatgaaagggtgatttggtatagctttactaatgttactaataggttttctgctgccccacaataataagtttttccgacaatgcagtaagccagatcaagccggactgaaaaagtatagccacaggtatgttgagcaaagcaactctcaggccggctcacagatctcggagaacgaggccagagaagctgtgctcccaagccagggcaggaaggttttataggttgtggatgaggggtgatgatgtgtcagccttaagctggctttgtgcccaagtaaggtcaaaggcttaggtggggacgagggtggctggtagcacagggagcaagctgcagtatcggccaagaacgtggaactgggtttttggtgccgttcctttgttaggaggttctctgagtggcagggtttggagagagaggagtggaagatggggcttcctggatcatgcagggtgagctggaggctccaattgaactgttgtggtgatcacttgtttgtacaaataaagcatgtctgaagatcagagggtggagcttgccaccagctaacagacagacaggaagtgagatggctgggcggagagaagaatataggcaggaggaaacaggaacacaggaactaggtcttttttttttttttttttatctgggaagtcagcaaagtgtggctgttgcttgcttcttcatctctctgatctttcagcttttgcccctgtttctgattccgggcctctattattaagacctattagaaactatttgcattacaaactattatttctttgtatagctccgactgtcctggaactcactctgtagaccaggctggcctctaacacagagattcgcctgcctctgcctcctgagtgatggatcaaaggcgtgtgccatcaccgcccaggttgatataattttaaatagaggaaaacagggagtatgttcagtttaccctctcctccttgaaaatgagtataatctaaagcttagaaatgagaccaatcagggcaatattgggtgctaagtgctttgttggagcctttggcttgcccctgcatggtcctggtccaagtccccacctaagtgctcagcttttgaccatacttgggcacaaacccagcttgtggcaggccatcaccctttgtctacactctataaaactttcctgctctggcctgggttctctgggactggagaacccaccgaggagttgctttgctcaatatactcattgttacacttttccaatacagtttgatatggcttactgcatcggtggcgacacctactatcagcaggcagaaaacttactaataagaaaggacagaatgtgtttggtttggctgtggtggcacattcccagcacttgggaggcagaggcaggcagagctctgtgaattcaaggccagcctgggctatagagtttattctatgacagctaagactacacaaggaacaaaaaacaaaaacaaaaacaaaaaaaaaacaaaccaaaacaaaaaaggacagaatgtaggccaaagaacacatgagtcatgagacagggtataaagttatttttctccccctagtttcaactctgtcatagttttctcttgtggatgtgtgaaatcagcttcctgggtattgaagtggccagttgctctgaccgaccttggcgttgccgtcttgcctgcctcacccaccccagtggcttgcaggcaggtctagtaccaacatgttcaactgtgctggctcattgatgaattaattctctgcttcccagctactgtggagcaggcagtgctactcagtcctgtgctcccatcaaggcattctccatcaccctggtcctgtagcatcaggaccaaagagtcagtgtctaagactcagaaaccacaaagccgaataaaccttccttttaagtgttttatcccaggcattttatcacagcaatacaaagctgactgatatacagccttaaagactttgttgtcacatgcctgtcgtgtaatccctgagctagagaagctgaggcaggtggagactcatgagttccaggccatcctgggctgcagaggaaggttgtacctcaaacaagtttggttgttaaagatacggcatctctaagtggcccagactggctccacgtctccatcttcctgcctccactcctggagtctgggatgcagacatctgatatatatacgcagctgcttaaaaccttgcagcatgacttcatacaaggtggatggctggtttcacctagcaacctgctaaccattaaccacccgtctgtgaccttgctgatctagattagctcattgtatagcatggtgcttggataccgtggaaagctgtttacttacaatgatggacatttagccaggtgtggtggtgtacacttgatatcccagctctcaggaggtggagacttgaggaccaggtgtgcaaggtcattggaggacagtctttacattgtagggatggttaagagcacttgctgctctgcagagaccaccatgtgttgtatacagtgtcgggtgaggccagaagagtgtgttcgatcccctggagctagagttacaggcggttgtgaaccatcccatgtggatgctgggagccaaactccagtcctttgtaagagcaacaaatacccttaaccactgagccaactctccggccccttattatatttttttaccctctggattgagactccagaaatatttttgatttattgtctgtttgtgttggatcctttgagatgggggttctcactatggagtcctgactggtctggtggtcctcctatccatactgtctgtgtgcctagattacaggtgtgcatcaccacatccggggagactctagacgtcttgaaagttctttcagaaacacccagaatttgggggcaggaaagagcgcttgcctaggagactaagacgctgagttccatctctagcaggctgagactgcaggttctgttgatgatggaggtttctgtcctgcctggtcccacagccaattgccccaaataaacacacaaacactatataagcataaaactgttagccaatggcctagggcttcttattggatagctctgtcttaatcattaacccataactactaatctctgtatttccacatggccttatcttaccagagaacacctggcacattctatcttcctggtctttacatggcgtctcttcctcgaggcctctctctcctctccctacccccagcattctcctcatctggtagccccatctctcttcctgcctggctactggccaatcagtgttttattcatcaaccactgagagaaacatacatccagaaggacctcccccatcgttctatcactagcgtaaattaggtaagaaggaaacttctgaagtccagtatgttcccaggaaacttcctaaaatcagcctttcagaagaaaggcattttcttttctctgctctttgcacattatcgacggaacccaccaagttccaggcagacgtggctattgatactagaggatcaacgctgacatagttggtttctagtagacacccatggcttactcgagcctttaaaaagtttatggtacagtggtttggaaatgacaaattatcaatgtccaacacagggtcccacaatgaagccattggacaacttcctagtctgcttagaaaactgacagtcacttcaaacatacaataacccagggagagatgaaagagccttctgtcactgctcaaacctgatcagattcactcagtctgcccctccaccttctggctggagattttgttatgttttgagatcagctagcctcagagtgatggaaatcctcctgcctcagcatcccaagtcctgagatcacaggcattgtactctctgcctggcttgttggagatcttttcaaatgaattccagaaaccacagaatttcacctttagttcttactgactgcttgtaggctgaaagctcagtgccaatgcacagttcattgcaagacattcgataaaggtttaaaactgatgtactggcccggtgggtaaatgagatactcattacaagtaaaggcacttgtgccaagcctgaaaacctggattccatccacgggacccaacatcgatagagaacagactccagaaagttgtcctctgacctccacaagtaaagccatgcatacaagtgcaccccatacaaataaatataactttaaaaatgaagcaatatagtataagcaaaaacacgctggtatattctaaccaggttagcagttcatacttgtaattctcagtacttaggaagcagaggcaggaggattaccacatgttagaggttaatctaggctatgtagcgacgaattctaggtaggtgtgggctaaagagttaagagtctgtcagtcaatcacttaacactaatccaaaatacagcaatatacaaaaatacgccactgctgccagtgtctgagataatgtggtgatgtcttgcttgaacaaataaagtctgtctggggggtcagagaatggagttggccactagctaaccatagaggtctggaggtctatacagacagacaggaagtgaggtagctgaagggactgcatattcttgagggattcctccagccctttataacccccagctgaggtttggtaagaataaatgggggaaaataagagggttggtgttcaaagtcatagagcctggcaaaaataagagtataatgtattgtttcacatgaagagagatccattaaccacaaagtactctaggcatccttgtagaaaaattacacagcctatggggctggagagacagctcagcagttaagagcactggctgctcttccaaaggacctggattcaattcccagcacccacatggcagctcacaactgtctgtaactccaagatttgacaccctcacacagacatacatgcaggcaaaacaccaatgcacacaaaataaaaataaacgaattattaaaaagaaaaagagaacttacacagcctaacaaaacaaaaccctgggactcccacaggcaggaaggagctccctggcctggttcctgagctgaacagtgtctcctcaaactgacagccaaagtgagcaaagccaggcccagaaagatgagtgactgtataagttcatctgcagaacactctagaaaatgcaagctagtctgtagaggcaggaagcctgtcagtgtttgctctggaatagagggagggaagaaaggagggtaacagatgtacacactgtctggggacgaggtgtcgaggctccacaggtgatggcccttatcaaagggctcagattatctttgtttttccctccttttttgggtttctttgagaccggtattaaatagtctggcttggccttgaacttgctatgcacccaggaatcgccttggttatagacatgtaccaccgtgcctggctaaagtgcatgctttgcatttctgcaatttattatatgattattatcttctaataaagtttatgtgaattttttggggggaaccaagggtgggagcacatatgtaaccccagcaccggggaagtgtaacatgaataatataaacccagagacagatactggggttcaagctgaagatcggagaagcaaagcagccagtcactagctcttaaacctctacctcagacttggggcaggggtgctgatcctggctccatgaatgctcagcatggctggagactaattgccagctctgagatcctgctgctatcttatagacctctctagtgctgggattaaaggtgtgagctctgtttctcttttatacttatttactctcctgtagccctgggtggtcttgaacccacagagatccatgtgcctctgtctcctgagttctgggataaaaggtgtgccaccgctgcctggcctctatgactgtggctagctttgtgctctgatcttcaggcaggctttattagatagaccataaacaatatatcgccacaggggaggcagatacaggaggattgcagggatatagagcaacaccctgtctcaaaaagaatggcctaggagctggaaagagctgtgtcatagaggtgtggtcctgcagctctaagcccagctcgtaagaataaagtattttcagctagaaggtgacaaccacatgtcagaggttaaggaattttaactaaatgtctgggcctggcattcagtgacacttttgtttagttgtttgttttgagacagggtctcactgtgtagccctggctgtcctggagctcaccgtgtagtccaggctggcctcaaactcacagatatgcccctgcctcctgaagaagcttcatttaggcataaggcttctctcttctttttgcatcatttacagaacagccatctttagtggggacaggggtatgcggggtttgtgacagaagacgtaacccttctctttttctcctctttgcccctctgtcctcctcttccttccttgttgagactggatctcaagagctcacgtcctcacactcactctgcctcccactcctaatccacctgctttagggatgtcaaagggtcttgcggcttccacactcctctgcctgggatggaggcaggcctgtgttccacgtggtgacgagccacgtgcacttatattccacaaacgtttcctggagtcctcttccagatccccacaaggggcacaggataaacacaatatgtctctgcatacatgcagtttgggaccaaaacagcacacgtataaacagcaacaaaaagcacttaagctttaaggtcagcggctttggcacaggccaagtccaccaggcttcgctgctgcttctgcttgggtgagtttgtacaaggcctgtgagctctcaagcagatgggccctgacagccagtccaccacaggagcttcgcagacaccccacccccaggctgccagagccgctctcctccctcgggagattaactctcagtgtgcagaaagtgacaatgacctccgaagatacccactttatgtctagggtggttccttcctgaccccaaagagcgcggaggaggaagcaggagaatcaggagtttaagacggcgcccttaaatgcatatcaagttcggggctggagagatggctcagaggttaagaacactggctgctcttccagaggtcctgagttcaattctcagcaaccacatggtgactcacaaccatctgtaatgagatctggtgccctcttctggcctgcagggacacatgcagacagaaaactaaactgtacatactaaatagtttggtaagaataaatgggggaaaataagagggttggtgttcaaagtcatagagcctggcaaaaataagagacctgaaacatcccaaccacacaagacttaaaaaaataaaagccaggtggctgggtagctcatcacggtcattccaacatccaggaggctcatgtaggaggacagtcacaagttccaggccagcctcggacacagagtaagacccgatctcaaaaaaccaaagtcaaggaaataattatatactcaaaacaaacaaacaaacaaacaccatgtatgtgcttcctggcacccctgcccctaattcactcccctacacatcctcatctaactgtgcacaagctccgtggtccagccaggcagacaagtgttagaggaagggcttccccaaccttagaaagctgctcaggaaaatgctcttagagccagtcagcctcctccagccctcactgcagggacagtcagcctcctccagtcctcactgcagagacagtcagcccccacagccctcactgcagagacagtcagcttcccccagccctcactgcagagagagtcagccccccccagccctcactgcagggacagtcagcctcccccagccctcactgcagagacagtcagcctcctccagcccnnnnnnnnnnnnnnnnnnnnnnnnnnnnnnnnnnnnnnnnnnnnnnnnnnnnnnnnnnnnnnnnnnnnnnnnnnnnnnnnnnnnnnnnnnnnnnnnnnnnnnnnnnnnnnnnnnnnnnnnnnnnnnnnnnnnnnnnnnnnnnnnnnnnnnnnnnnnnnnnnnnnnnnnnnnnnnnnnnnnnnnnnnnnnnnnnnnnnnnnnnnnnnnnnnnnnnnnnnnnnnnnnnnnnnnnnnnnnnnnnnnnnnnnnnnnnnnnnnnnnnnnnnnnnnnnnnnnnnnnnnnnnnnnnnnnnnnnnnnnnnnnnnnnnnnnnnnnnnnnnnnnnnnnnnnnnnnnnnnnnnnnnnnnnnnnnnnnnnnnnnnnnnnnnnnnnnnnnnnnnnnnnnnnnnnnnnnnnnnnnnnnnnnnnnnnnnnnnnnnnnnnnnnnnnnnnnnnnnnnnnnnnnnnnnnnnnnnnnnnnnnnnnnnnnnnnnnnnnnnnnnnnnnnnnnnnnnnnnnnnnnnnnnnnnnnnnnnnnnnnnnnnnnnnnnnnnnnnnnnnnnnnnnnnnnnnnnnnnnnnnnnnnnnnnnnnnnnnnnnnnnnnnnnnnnnnnnnnnnnnnnnnnnnnnnnnnnnnnnnnnnnnnnnnnnnnnnnnnnnnnnnnnnnnnnnnnnnnnnnnnnnnnnnnnnnnnnnnnnnnnnnnnnnnnnnnnnnnnnnnnnnnnnnnnnnnnnnnnnnnnnnnnnnnnnnnnnnnnnnnnnnnnnnnnnnnnnnnnnnnnnnnnnnnnnnnnnnnnnnnnnnnnnnnnnnnnnnnnnnnnnnnnnnnnnnnnnnnnnnnnnnnnnnnnnnnnnnnnnnnnnnnnnnnnnnnnnnnnnnnnnnnnnnnnnnnnnnnnnnnnnnnnnnnnnnnnnnnnnnnnnnnnnnnnnnnnnnnnnnnnnnnnnnnnnnnnnnnnnnnnnnnnnnnnnnnnnnnnnnnnnnnnnnnnnnnnnnnnnnnnnnnnnnnnnnnnnnnnnnnnnnnnnnnnnnnnnnnnnnnnnnnnnnnnnnnnnnnnnnnnnnnnnnnnnnnnnnnnnnnnnnnnnnnnnnnnnnnnnnnnnnnnnnnnnnnnnnnnnnnnnnnnnnnnnnnnnnnnnnnnnnnnnnnnnnnnnnnnnnnnnnnnnnnnnnnnnnnnnnnnnnnnnnnnnnnnnnnnnnnnnnnnnnnnnnnnnnnnnnnnnnnnnnnnnnnnnnnnnnnnnnnnnnnnnnnnnnnnnnnnnnnnnnnnnnnnnnnnnnnnnnnnnnnnnnnnnnnnnnnnnnnnnnnnnnnnnnnnnnnnnnnnnnnnnnnnnnnnnnnnnnnnnnnnnnnnnnnnnnnnnnnnnnnnnnnnnnnnnnnnnnnnnnnnnnnnnnnnnnnnnnnnnnnnnnnnnnnnnnnnnnnnnnnnnnnnnnnnnnnnnnnnnnnnnnnnnnnnnnnnnnnnnnnnnnnnnnnnnnnnnnnnnnnnnnnnnnnnnnnnnnnnnnnnnnnnnnnnnnnnnnnnnnnnnnnnnnnnnnnnnnnnnnnnnnnnnnnnnnnnnnnnnnnnnnnnnnnnnnnnnnnnnnnnnnnnnnnnnnnnnnnnnnnnnnnnnnnnnnnnnnnnnnnnnnnnnnnnnnnnnnnnnnnnnnnnnnnnnnnnnnnnnnnnnnnnnnnnnnnnnnnnnnnnnnnnnnnnnnnnnnnnnnnnnnnnnnnnnnnnnnnnnnnnnnnnnnnnnnnnnnnnnnnnnnnnnnnnnnnnnnnnnnnnnnnnnnnnnnnnnnnnnnnnnnnnnnnnnnnnnnnnnnnnnnnnnnnnnnnnnnnnnnnnnnnnnnnnnnnnnnnnnnnnnnnnnnnnnnnnnnnnnnnnnnnnnnnnnnnnnnnnnnnnnnnnnnnnnnnnnnnnnnnnnnnnnnnnnnnnnnnnnnnnnnnnnnnnnnnnnnnnnnnnnnnnnnnnnnnnnnnnnnnnnnnnnnnnnnnnnnnnnnnnnnnnnnnnnnnnnnnnnnnnnnnnnnnnnnnnnnnnnnnnnnnnnnnnnnnnnnnnnnnnnnnnnnnnnnnnnnnnnnnnnnnnnnnnnnnnnnnnnnnnnnnnnnnnnnnnnnnnnnnnnnnnnnnnnnnnnnnnnnnnnnnnnnnnnnnnnnnnnnnnnnnnnnnnnnnnnnnnnnnnnnnnnnnnnnnnnnnnnnnnnnnnnnnnnnnnnnnnnnnnnnnnnnnnnnnnnnnnnnnnnnnnnnnnnnnnnnnnnnnnnnnnnnnnnnnnnnnnnnnnnnnnnnnnnnnnnnnnnnnnnnnnnnnnnnnnnnnnnnnnnnnnnnnnnnnnnnnnnnnnnnnnnnnnnnnnnnnnnnnnnnnnnnnnnnnnnnnnnnnnnnnnnnnnnnnnnnnnnnnnnnnnnnnnnnnnnnnnnnnnnnnnnnnnnnnnnnnnnnnnnnnnnnnnnnnnnnnnnnnnnnnnnnnnnnnnnnnnnnnnnnnnnnnnnnnnnnnnnnnnnnnnnnnnnnnnnnnnnnnnnnnnnnnnnnnnnnnnnnnnnnnnnnnnnnnnnnnnnnnnnnnnnnnnnnnnnnnnnnnnnnnnnnncccagccctcactgcagagacagtcagccgccccagccctcactgcagagacagtcagccgccccagccctcactgcagagacagtcagccgccccagccctcactgcagagacagtcagccgccccagccctcactgcagagacaatagcctcccccagccctcactgcagagacagtcagcccccccagccctcactgcagggacagtcagcctcctccagccctcactgcagagacagatagcctcccccagccctcactgcagagacagtcagcccccccagccctcactgcagggacagtcagcctccccagccctcactgcagagacagtcagcctcctccagtcctcactgcagagacagtcagcctcctccagccctcactgcagagacagtcagcctcctccagccctcactgcagagacagtcagcctcctccagccctcactgcagagacagtcagcctcctccagccctcactgcagagacagtcagcctcctccagccctcactgcagagacagtcagcctcctccagccctcactgcagagannnnnnnnnnnnnnnnnnnnnnnnnnnnnnnnnnnnnnnnnnnnnnnnnnnnnnnnnnnnnnnnnnnnnnnnnnnnnnnnnnnnnnnnnnnnnnnnnnnnnnnnnnnnnnnnnnnnnnnnnnnnnnnnnnnnnnnnnnnnnnnnnnnnnnnnnnnnnnnnnnnnnnnnnnnnnnnnnnnnnnnnnnnnnnnnnnnnnnnnnnnnnnnnnnnnnnnnnnnnnnnnnnnnnnnnnnnnnnnnnnnnnnnnnnnnnnnnnnnnnnnnnnnnnnnnnnnnnnnnnnnnnnnnnnnnccagccctcactgcagggacagtcagcctcctccagtcctcactgcagagacagtcagtcccccccaatcctcactgcagagacagtcagcctgccccagccctcactgcagagacagtcagcctcctccagccctcactgcagggacaagtcagctgtccccagtccttacagtagagacatgaggagtctgcagggaacttttgggagagatgttctgcctctggaaattgctgtggggatttgacgtttgcagataagacattcagtcaatgtctggaagtgaagtcttcataagtggagcagggagaaaaacccactgtgacctgatgacatccaaaccaagtcagaaccttccagcagttttggttaagttgtcctcttgtacttgctgccaccgctttgttgttgctttctctgtgtagccctggctgccctggaacttgctctggctgccctggaactagcaaactagtctggaactcaagacatgtgcctggctctgcctcccagctgctgggaggcagaggcaggcagacctccctgaattccagcacagccaggtctgtgtagagagactgtctcaaaaagtgagaggtgtgtggggggtgtctcactgtgtagacccatctgcctggttgtcctggaactccacctggttcttccttcccgtggttaaaggggaacactaccatgcctggcctagacagcacagttgtatacagtgttggacttgaacccaggacagtatgcatgccaggcaagtactctgccaactgagatacatcccaggtcctctcactttaattcttgagtctatcctttaaatttgccttggtgtttcccccatctccactccaccccaggttccaactctctttcttttttcttttttctgctttttttttttttttttttttttttttgttgattttttgagacaggatttatcagtattgtttaggagctttgaagcctgtcctggaactcactctgtagaccaggctatcctcaaactcacagagatccacctgcctctgcctctgcctcccaagcgctgggattaaaggcgtgcaccaccaactggcctccaactttcttgaggagtatgtgtgtgtgtgtgtgtgtatgggaggcactctggactttgaccttcacgaggaattccagcaccacagttttcccctggagtctcctggggccaggttcatgttagtcctgcagtgaggagactctggggacgcatgcatggctgcatgaacagatacttttggaagaacagtcagttttatgagcttggctgaagctatttttaccatgcgtgcaaaatcagctagctatgaattctgaatactttagcaattaaacaatgataaaaagcccccaaacagagtagccgctaacataaacaaagggcaagttgaaaattaacaccaatttaaggtgacgaattgtgttgtttttctgaaataatgggaaccccgcccagcactaggttcttttgaatttggcatgatgttttaccgtgtgcccagtgatgactcagttcttccctggtgcagatctatctaattgccaagaaatatgttagtactggccttgtggctttcacttggtatgaaaccaaccaaggcattgagcccatgaaggagaaccaccagcataagccaggtgctcacatgcaggcagagtcatccatgtgtgagccacacatgtgttccataattgtccaccagaaaatggaaaacatggagtgaaaaatttttctcatagacccagggaagtcattgacttgggttgggaaacattgaccttggcttccagtgtggccttaagctaatcatttactgcttaacaaaatatttaaaattttttatttactgccattaattatcattattattagtaatagcattttggttttttgagacagggtctcattatgtagccttggctagcttggagcttattggtagaccacattggcctaaaactcatagagatcctttggctctgccctctgagtgctgggattaaaaggtgtgtgccctgtaccaccactcccagctgagtttactcttattttagagtatgagtgtttgatttgtatgtaactgcatcgtgtgtgtgtagtgcctgtggaggccagagtatcagattctctggaactggagttacagatggtggtgagcctcacgtggatgctgaaacggaacccaaggtcctctgcaagagcagccagtgcccttaaccactgagacatccccccagcccctcattttcagaactcggtccattctctgtacacaaactagaaagacagagttgctagtattcttcctgagagatgaaggaaagagttaaggtcagcttctttccttcctccctctgtccctccctccctcccttccttcctggacagggtttctctgtgtagccctggctatcctggaacttgctctgtagaccaggctggtcttgaacccagagatccccctgcctctgcctccccgagtgctgggatcgaagatgtgcaccaccacacgaagcatagtgttctttctaaaaatcttatttttgtttatatttatgtgtctgtgtagtgtgagtgcccctggaggccagaagacagtgtcgggtctccagggattggagttacggtgtttatgagtcacctaacatgggtgctgagaaacaaactctagtcctttgtgctcctaactgctgagctttctctccagtccagcctccagcctttgagacgggatctcacgtacccaggatggcctcaaattcattgtgaagctaggaagatagctcagtgattaagcgtgtgtccccagatatgaccaccagtgttcagatatccagcacccacataaataccaggtggtggcctgcctgtgagattccagcctggaaaggcagatagtggatccacagggcaacctgacccctggaactcactgggtagctagcttatgaagactttgaacttttgatcctgcctcccaaacagttgggatcacaatgcctgtacccccagtctgtctctgcttgcctgtctgttctctttaagtgacaaggtcacaggcctgcaccaccatgcctggcaagagtgagcatattttaaagttctccatcacagcagggcacggcggtacactggagaggcagaagcaggcagatacctttgaattctaggccagcctggtctacatagcgagtcccaggacagcccgggctacatagtaagaccctgtctcaaaacaaaaattccccatcatagaactgttgcatggatcaaactcagaaaatctggaaagagcccgcctggcccatcacaggcaggctgctgatcctgagggccccttagcaaatgacagcaggagagaaagtgacgtttttggtttggagcacaaatgtaaacagcctggcgccccggcgctgacattcagcctttctgacccatccctcggtatttgtggcttggggctcctccacatcctcccccactctgccaacttctccatccctgaggcctttctcttctcggcccgagttcccactaggtcacctgcgaggcagcgccccccagtggttttcttgttcgttgccatcactgggaaatccatggaagagagatgaagtctgtatccataatggaggtttaccaagtgcccagaaccaagaggctcaagagtgtgtccagggaaccacgctggatccccactcccatttggaaaagtggtatggaagaagctgggaagtgtcaacttgccttggatctagggcaagttccaacacctctggccctgattgtttttgtttgtttatttgtttgttttttgtttttcgagacagggtttctctgtggctttggaggctgtcctggaactcaccctgtagactaggctggtctacacagtgcaccaccactgccctgtggttggttggtttttatgaagagccctgcccaccctccttcgagggctgggggaaacaatgcagagatggctggagaaggcacctaccacgtgtattgcccccatttacccattacactcctggctagggaagaaggtgagccaccagggctgtgtgggcgggacaaagctggggttgactactttcttccctccaccattgaacttctcatcgctgggaaactgccaggctccagtaagagaggggggaaaatacaaacctaaccctgtaacttcccagctcaaagccccgaggcccttcttccttgccttcagagcagggccaagctagcaatgagacagttcaagctgtggtgctggtgttctccctggcaccatacttccagttaaagctgcctttcacaccctctgctgcctcagccaggaggagccttgcctcatctgcaaatctgttggtctttctttctttctttctttctttctttctttctttctttctttctttctttctttctttcaatacagggtgtctcagtagctatggagcctgtcctggcattcactctgtggaccaggctggccttgaactcacagggatccgcctgcctctgcctcccaagtgctgggattaaaaggcggagacctacttgaagtcctgctcttgagggtgggggagcgctcactcaggaggaggcttcctgacctccctccagctctatgcccagcacacggagcctgccttcgctgacgacagattctccctctgtgggggaagcacttgaagagagcgcgctcctcacacacctctcagagctccatcagaatcctgcccccgtgcaaagtcttagtaactctctgtgaaatggattaggaggcgggactcagagatccccagccacacatcagaaagccacaggggaagctgatgctagcgcagttaccacccacacgaactccagggcccctcatccttgtgggagggaactgcaaagctgtggagactcagccaagggagggcagatgggatggggagtgaacattgcagagctttcagagggcagagcctggcttcctctcataggctgagaggagttgtcacctcctggccccaccccttgccggcccaatcagtcaatgtcctttggctttggggttcacagttttcaaaccacagacgggagggagtcctctgaggatgcttttttcatagaatagatcaactcctaaatctgaagttgccttttggcttcgagtgcttctgtgggtcattgctacagctggggggagagctctcaccgtttcatactttagagatagccagttaaactgggattcttctcagggatcagaaatcaaagtccctggaaaaggggggcgggagcgtgcattactggggactcagaaggagatctcagaagtccttagtcagttcggaacccttctgcttccagcttcagcccctacatcccaccttgtcctctgctctgcagggacagctcagttctaagcctttggctgcagccagcccaagctctttttcactggactgcctccttagcggcctttgtctgggggtctctttgtctggggtctctttgtctaggagacccctttggctctgtttcccagtcctcagtctctcctccctttctctgggttaggctgtcccctccctctctgcgggggctgagaggctcagcaaggggagcggggctgggttgccatggtcaccttgaagccagccgcagctggccagggcagctgctctcgggcccccgaggctggagcttggacaaagccgggaggcttcatcggcctcagatctggatccccaaaggcctgagcctggggacactgaaactcagaacctggaggtgagagggaggggatcagctcacctgggagagcaggagcaaccttggggctgggctgcctttatgagggaccaggtaggcctggaggcgtggtaggagggagaaggatggaagccttgtgccaaaacaggttggccagctggcaggcaggcggggctttggtggccagcagcctggagatgggctcaattctatctctgggccttccatcaatcttgtggttgtctttcctttctaagtctgccccccatcttctttctttcttcctccctcctttcctcctccctttcaaactccatgtctcggtctctaccctccccatatcttagtttcattccaacctccccactctctgtttcctccattccagttgccgtcccaaacgtttgctttccttctgtgtccgctccccgctccattcaatcctttctcctccctgtgcctccacctatcactttggtgccatctgtctgactcctctccctggagtcagttgtgtctctccgtgaccaccagcctctctcccctggttctccatcccttctgggtccctctcccagactatccacggctaatgtgtctaatttttctgtcctagatttatgttttggatgtcctagaattatcttcctttttttgtcatcacactacaggcctcagtttcccatttgaactatgaccagggtcttttccagctccctacccgtcacccccccccacacacacacacacgcaccagaggcgtcccactctccccagctgctgacccaacctacttccccagaggcagctgcatctcagggcaaggactgtggctagtgtgtgtcgagggcagcgagggtgggcccatctggtccaccctcctttcactcctcctgccctgcttccctgcagtggcgggggggggggnnnnnnnnnnnnnnnnnnnnnnnnnnnnnnnnnnnnnnnnnnattggacctcttcctgggcttgcagggggaaaaaacggtccagttctataccctccagggttctagggtataatgggggcttctggagttgtgagtggtgagagaaaggagcagggggctcggggagccacagaccggcacactctcggttcttggctcagctctgtaggcccctgaatggctgggatttccctctctggcccctgggaatctgggctccaagcagcacattccagccggctccagctccttttctgttgtcacttgactccgctgggccccagccccgtgtccctcctacttctccagccctggtctggggcgaggtgggcatcaccgactaggaattttccctgggagagtgaaaagggggcagaggcttcaagactctggcttcctccacatctcccatggacccttcactagtcagtgcgagtctagggcgtgcaatgtcccaacggggtgtgaggagttgaagctccgcctgtccggggcttccccggagcatctctcctgggaggaggggctgtgtgccgttgcaggtgaggttactgggaagccttggccccacctccaggcggactccacaccccgcccagtctctgcagggcccagatttcctattgctgtcttcagagggggtgagaccaacaaaaatccctccaactaaccaacccctcctccacctcaaaagcataaagcagccaggggtgggcttttcttccagtgaccatgggggctattagcaggtccttcagcagctggagcgtccctgggtttgtaaactggagacccagcctgccttggcttctccctagtggccgcttatcttcctggtagctttttctgttcttgtctgttttttctttacactctttggaaatgcttttgggtgtgagttttgagtcagttgggaggtgcaacagggtggtgagaccggcgaggttgctggagactttactgtgacctgacattgtccggggacttggcaggtgtgggggtgtggagagaggtagggctgacaggtggtgctgaatggggacagaacacctcccacagaagctcggcggtcgcccccgcccccccccccccccccccccccccccccccccctccaccatctctcccttccgtggcttagcagctctgttcgttgttttcttacgtccctgggtcttgcgttcccgtctttttgggcggcttgtgatttccagggcgcctctctatctttctcctccacccccaccgcgtcctggctccattttgcgtctctccttgccagaaaccagattctgcggctcccaccagggactgagctggctgggaactgaagaaggcttgcctgaggaggactccagagcgagtctggatggagcagggagcccagggggacccagagctgggagtgtggacctcagggctcctgagagaagagaagggagctgcagttggggaggggttctagaggaaggggacagaaaaaagtagagaataaaagagtgtggcccgtcctcaggctcgggagtaatctaggttgggagccggggagcgggcctgtgccaaaatgtagcaaagtggggaggagtgagagccaagcggggctggctagacaggtgagcccggttcccagggacgaggtggggaagcacaggaggcagggggcgcgggttggggagactcagctctgtgcgccgccttggggttttgattccccatctgaaacagaaagggccctgactttccgaaaaagtatcttctcgtagggaaggatctgtcttttcctgggtgaggggagagccgagcccccagaggacaggtgcgcttatgtagcccactgagtcatcctatcggtgctccctgggccgtgcctacgagcatgctctgttaagctgccccgccacagggagccagcctgacgcccaacctaccagaccagccacgctcggtggttgccgggttgtgccaagagacaagtcaccgcccaatgagcaacgctcctagggtccccttctggcctggaattcctgcccagcaccttctcccagccacgcccggctggcctggaactgactggctgagaaggatggaggtgtgtccagaccccagtggcaccatagggacaggtcacagtagaatgcgtgagaaagtggagaaatggccttgcccttcttgctgctctccccaccccagtcccacctgtccccacctgctcttggcttccctctggcttagtcacccatgtgggtttgggaggggcagttctctggggatcctgcaccccagggcctgagtgggattcacattgcctgccatttagtattaaacaggtgtctagaggtggcaactcactaaatgctgagatctagctttatttgtcacctcagggtgtgtgacacacacctgtaatcacacacctgaaaggtggaggcagcaggatcaagggttaaaggtcagcctcccttggcatcatagtgagtttggagacttgaactagttgagaccttgtctcaaaaaatcggccatcctgctatagaggaacatgattttcatcccagcactcaaggagaggcaggtggcaccccatgagttcaaggctgttctggtctatatagctagttccaggcccacccaggctacatagtgagaccaacaaaaatccctccaactaaccaacccctcctccacctcaaaagcataaagcagccaggggtggtggtgacacaggcctttgagccctgcactcaggaggcagaggcagagggatgtctgtgagttcgaggccagcctggtctacagagctagttctgggacagccagagctgtcacacagagaaaccctgtctggaaaaaacaaaaacaaaaccataaagcaatcaaatacacacaacaaaagatgccaaggtgtgtatggagtggataagaattgtgtgtgagctgggcttggtgtttagctgatcaggagttaaaaagaggataataacatgtgtgtgaggggctgtatggtagccggacgtgtgagcatggtacatttagtttactctagtgtttacagagggcttgttaaagcacgcgtgtgtgtgtgcatgtgtgtgtgcgcgcgcgagcgtgtgtgagtgtgcgtgggcgtgggcgtgtgcgtgtgcgtgtgcgtgtgtgtgtgtgtgtgtgtgtgtgtgtgtgtgtgtgtgtatggagctgtgtggttgtagttctgtggactgggagatggggtttaggagaagagaatgaagggcctgaggcccagtgtcctgacccttgacttgtaattggttgtagaagggccaggtgggtgccaatgaggtgaaactcctaagcctatctgattgtgggaatctagacctaggggacaatgagaaagggatggccccagaacttgtcagctatgcttcagcagatcctccgcttggcccagcgccctgctcccagagcctgctctgtttacctccagctttgtttctgccctgtctcccccagtctcctgtccctgcctggctttgtatctctgccccaggctcctcttagcactgtctggctctgatgactcatctggggtaggcatgaaggttactcaggggaacaagggccctgctgtttctacagaggtgggggtggagagtggcacccaggaattccctgccaggcttcccagtcccagcggcctgctcccctccaccatggggctgtacccccaagggactggtcatggtgccttttagttctaggctcccttttgatagccaagtggcccctggcaacccagtcagccccttcagctgctgcttcggtgatgggggtctcagctgcctcttacattcctgtcctagagcattgtgggagcagctggaggacaaagggatggggagactcccccaactcctcctacctcctggggtgacctggcttccccgtagttaagcccgccctcatctccaaggcaactcagccttctcagctgcaaggctcttctgctaccttcagtaagttgggacttgggagaacaggatgttagaggaaggagagctagggggacttgatggcaggggtgtgagaagggcagttggtgtccctccggcttccaggtgctttagaattcagtacaggtctcaggcactgtcaggtttcaggagagcatttctgtccccagaacagaggacagtggatccttggatttatatggagacttcagctagaatggttttggagagggtaaactgctcataccctagaaggaacagagagcagggggagaagttccatggggactctgacccagagggtccaggttgggctctgagtctctgtcaagggccagagaatgtccagtctgctgttctggctaccgcagtggggtagggaactccagaggactatgaagttaggcattgatggagtctggtccgtagaggtttgaggggctcaggctagctggtgtttttattgtatcttcctcagtaaaccaggtaaacttctccagggcttaggttttgaaaaccagagtaagttttacatgtaagattttacgtaaatgcatgctactgtctgacaagtttgagagtgctaacccagccaacctttctcctttttgtgcatgcttccctctgtcgccctgttcatgatctcacacagcctcgctagacatacacggacgtgagagtgtggacagacgttgtgggtttgcttctcctttgctttcacatggtggaatgattctcgtacttccgagtgtggctttccatgttaagcagtggcatggggaacacataccaagtcaggttcacactaattcttttagtttacagtaatttttagttttatgtaatgttgtgataaagtttgaagggaacctcgagtggggaccttggcggactccatggcaggcgagggtgaccgaggcagagggacaagcatgccaggcagacagagcttaagtgagaagttttattagaaagggaaggagagggaaggaaagagaaaggaggtgaagagacagagacagagagaggccagaagagaagagggagacaggagaagtcaagtctgccccaggggaaaagcgggaagtaagtgggcagggcctttcttttaaaggggtcctttgcacctgcactacacaatcatggaaccctgggctgagcagtgtactgcctgagtgcattctgccaggtgacaggggctggccagcatatatgtattataaaatactctgtttatggttgtcttgttgttttgcctgcatgtatgtttgtgtagtgtgtgtgtgtgtgtgtgtgtgtgtgtgtgtgtgtgtgtggtacccacagagctgagaagagggctttggattccctggaactggagttatagatggtgtggatgctaggagctgaacctggtcctccgtaagagcaacaaatgctctttactgctgagccatctctccagccctcactttaaaaaacatacaaaaacaaaaaacctttgttggtttctgatttgtgtgtgtgtgtgtgtgtgtgtgtgtgtgtgtgtgtgtgtgattcagagtctcatgtaacccaggctggcctcaactttagaatggggctgaggctggctttgaactcctgatctttctcctctccagtgaattgccagtgtgtgcaccacaccctcctgcctttctctcaaatgtatgtattattattgtttacttcatatgtaggggtatttgggcttacatgtatgtctatgtaccacaagcatgcatggtgcccttggaggccggaagtgagcatgagatcccctaggccttgagttatagatggttgtgaactgtcatgttagtgctgggaatctaacctggctcctctggaacagccgctgtctccccagccctttctttaaataaataaataaataaataaataaataaataaataaatgttattacatttatttgtgtgtgtgaggtcagaggatggcccgtagtgggggcgcacacctctaatctcagcatccaggagcagaagcaggtggatctctgtgagtttaaggccaccatggtctacacagttccaggacagccagtgctgtatagagagaacctgtctcaaaaacaaacaaataaaaaggggtcaattttcaccttccacccatgagtcctaaggatagaattcaggccctcgagcttgaagctaagtgcctttacctctgagtcatctctctggctctttacttttttttttcttttcatctctacatagaacatagctacatagaagcccccgcccccgccactccaaccccccagaacgccccctatgggaattcacatggcttatgtatggacatctggggacagttctgagttcttacttcgtggtgcttttcctagtccctatgtttgaaccatatgtcgtcatcaggctgctagattgctatccaaatatattctgatactacaatagcaaaaaaatggcggcttcccttttgtccctcttcccatggaagatagaacctttaaaaatactttgttggcgctggagagatggctcagtggttaagaacacttactcctcttgcagaggacctggcacccacatggtgaccacacgcaaccatttgtaactcaagttctatgagttctgcctccctcttctggccccctcagatactgcatgcatgtgtgtgtgtgtgcgcgcgcgcacacacacacacacacacacacacacaggcaagcactaatatgcataaacattttaaaaataaatcttaaaaaatactttgtcaaattaggcttgccaagtgtgtgtctcccattccagcaaattgggatgttaaagcaggaggatctttgcaagttcaagaccagccttagactgcatagtgagtttgaggccagcttggctgcaccgtaagaccctgcctcaaagaagtcagtctgatttgtattgttataattccagtgaatgtgatgattttttaaattaatatattttagacacgttggctctgttcttctgtggagtgagtgctcagaggcttgggccatttctatatcaggttgtttataaattgttcctcttatccatttataagagctcttagtttattataactattaagccctttgtctcttctgtgtgttgcctacatttttgaagccattttttttgtttgtttgtttttacttatttttgcttttgcttttattttctctattgatggaggactgggggtggagctttaggcgtgttatttagtgagcagatccctatctggtttctttgtgtgttaaatatggatcaaaacatctaccttataaagtggcgggccatgaagttacggccactgcctggtgtgtaggaggaaacagtctaaaagtagaaccacactctaaacggtgacttcttacttttatttttggccgttttactcttcttatccccaaagcagccctcctgtctgtctcttgctgtacctagatcccttggtgagcagactctcctccctatttgtcccctgcagagatgccccctcctccataggccggagggatcaggagcgatggggacaggggccctcccatctctactgctgctgcttctcttggtgacgattggagatgcagacatgaagggacattttgaccctggtgaggagactgaatcttgggtccccgaggactagagctggggagtcagagagctggggggacgctgacccatcccgtgcctgtgtccttcagccaagtgccgctatgccctgggtatgcaggaccgcaccattcccgacagcgacatctccgtgtccagctcctggtcggactccaccgctgcccgccacagcaggtacctgattctgggggttgccttgaaggagctctttaatggcttttccagtgtccctgcacaggccaaggggcttttgagaaggcccaggccatcgaggcgtacgtggtgtggtgagagcaggggttttttttggggggggaggtgggggttcgagacagggtttctctgtggctttggagggtgtcctggaactagctcttgtagaccaggctggtctcgaactcacagagatccgcctgcctctgcctcccgagtgctgggactaaatgcgtgcaccaccaccgcccggcgagagagcaggctttttaaatagacccgcgaccagttagggtacccagatagtatgaagctctgtattcaattttaagcaccccataaacaggcgtggtgtcgtttgctatgattccataactcgggaggtaaaagcaggaagaaaagaagttcaaggttacatagctaaaccggcctgagatacaagttacattgtctcaaaaataaaaaagaccgggggtcaagtgttgccctgacctccttcttcctcccaggctggagagcagtgatggagacggggcatggtgtcctgcagggcccgtgttccccaaagaggaggagtacctgcaggtggaccttcgcaggctgcatctggtggctctggtgggcacacagggccgccatgccgggggcctgggcaaagagttctcccgcagctaccggttacgttactcccgagatggccgccgctggatggactggaaggaccgatggggtcaggaggtgaggctgggagtggaggcacctgtgaaggatgcattcttcttttcgccatactctaaacagcatctgccacgcccatgcgctagcatctccagctccagactctgccaggagcaccacccaatgttggcagccctgctgcctcttaacaaccattggcctctgcagtggactgcagtcctcactcaccccaaatctgttcctctttttccttccttccttccttccttccttccttccttccttccttccttccttttctctttctttctttccttccatctttctttctttcttccttttttttcccgagacagcgtttctctgtagctttggagcctgtcatggaacttgctctgtagaccaggctggccctgaattcacagagatccgcctgtctctgagtgctgggattaaaggcgtgtgccaccaacgcccggcccctgttccctttcttgttctcagcttggggaaatttaccgtcccccccccaccccatcccatgaccacaatggcattgatggctcgctccctctctcagctcctctctgtgcccacctttgtggcatttcctgaaccctgccactccatcccacctccacccccagctctaagccacgagtactttcatccagctgaatgaaatctaaaccgttcatcctgcctctgtccctttctgtccactacttatcagacctcttcctcagggctacaaaccgcacacacccagctctcagcccagcactggctttggctctaccagaaaacgaaaacaaaaaaccccaattctttgagtacaaagcacttcagttaacccagctccagctccgggcaggggatctcaccctcctctgatctctgcaagcatggcatttgtgtgtgcaaacccacacacatacacatacactgtgccatcctgcctttactgctgtgtgtggaacaaaccaggctctctccccacagtcgggccacacagttgctgctctctatgcctggcaagctcttccccagacaccagaggctccctctcccagttctcctcagagatgtcacctcctgcagatcttggtctggatgcccacctcacagctctgccccacacactgcctcttgttcctcacagctgtcccgtgaggaggggttgacttctccactgagatcatgtccggtccagagtgggcacttggtcagctgttgaattgaacagagggagtggggtgaagcaggcaaggatgctgagatgggattctgcggaagggtggagccagctgcatgagtggcttggagacatgtggaaggaagtaggcaggggagagggtcaggggaggcatgactgagggcagacctccagagccgccagaggcatcagtggccactggtacagaacctcctttcaaaatggccagctgcgtcccccagtacccttcaccagcctcttggtggctcctggagcctgagccagggagccgctgaaggctgggaggttagatctgacctgaagccctgcccactcagccaccctttttttccctgcccgcaggtgatttcgggtaacgaggatcctggtggagtggtgttgaaggaccttgggccccccatggtggcccggctggtccgcttctacccccgggctgaccgagtcatgagtgtctgtctgcgggtggagctctatggctgcctctggcggggtgagtaggtcagccccacaagaacccctttccagtcctggaagcgggaaatagagactggggggggggtggtatcagaggttgtcttctgtcaggaagctgtcactaagagaggagagaggggactagacagtgtttccttctccacaccagtaagaaaggactgcaatcgctaaggccaggtgcctccctctaactccccctctttccatccttccagatggactcctgtcgtacacagcccccgtggggcagaccatgtacttatctgaggtggtgcatctcaacgactccacgtatgatggacacactgctggcgggtgagaggggtgactgcacggagcttgggatgggagaagggctgtgtgtgcgtgcgtgcgtgcgtgcgtgcgtgcgtgtgtgtgtgtgtgtgtgcgtgtgtgtgtgtgtgcacgcgaatgtgtggggggggggtatgtatgtggtatgtgtatgtgtgtgtgtggtttatgtgtatgtggtatgtggtgtgtatgtggtttgcgtatggtgtgagtgtgtggtatgtatgtgtgtagtatgtggtgtgtgtgtgcgtgcgtgcgtgtgggggggtatgtatgtggtatgtgtatgtgtgcatgtgtgtggtgtgtgtgtgtgtgtgtggcatatgtgtgtgtggtatgtggtgtgtgtgtgtggtgtgtggtgtgtgtgtctgtgcccacacgcccacgtgcatgtgaggagatgtggagtagcagtagcctcggcagtgaaatggaaggactggggagaatgccagttggggggtcttgaaaggacaggccgggaatgaaggatagtaaggtgaccactagtccaaaggacactttgtatggattagaaggaggcaccccgtggtccagacaaggatggccttgtaagagaacctgcagggcatccggaactcctgcaatcccagcacttgggaggtagaggcagtagcatcagggccttcagtttgttcttgctacatagcaagttctaggccagccggactccctaagccactgtctataaacgaaacaaggcaccgcccccagctaagaatatctgttgggaattgtcacattaaacacacacacacacacacacacacacacacacacacacacacacacactcacacacacgctatagacggaaccgtgtgccttcctagcggcacttccgcatggcgtgtgcctcacagagagtaccttgtgatactttggggtgtgatgcacgcgagagagggagagtgttgagcatgatcttgggctgggaaaggagagcgggtgagaatcaggctgttcaggccaccactgcgggtgtgtgtgcaggacctgcactgtccctatcatcttccctctgagcagccctttcctgttccctccaatcaggctgcagtatggcggtttgggccaactggcggatggcgtggtgggtctggatgacttcaggcagagccaggagctgcgggtctggccaggctacgactatgtgggatggagcaaccatagcttccccagtggctacgtggagatggagtttgagttcgaccggctaaggactttccagaccatgcaggtgagcgagctccatctgccctcccgaggacaccagtgccaggggaggtgctgctgctgcggggtttcctggccttgaatcagtcnnnnnnnnnnnnnnnnnnnnnnnnnnnnnnnnnnnnnnnnnnnnnnnnnnnnnnnnnnnnnnnnnnnnnnnnnnnnnnnnnnnnnnnctttttaaaaggggccctgccatggcctgggagggagagcctgtgcgccatgccttggggggcagcctcggagaccccagagccagggccatctcagtgcccctgggtggccgcgtgggccgcttcctgcagtgccgattcctctttgcgggaccctggttactcttcagcgagatctctttcatctcgagtaagccccagagtgtgcctggcttcactgcttaggtttacctgttgatcctgtggtgtccccagcatatggattcctggtattatatcgcctgtcacctgtgagatttcccaaactagggaagaacacacagagtctttttccttgttgttgtttttgttttggtgttttatagattcttttttatcttattgttttgctattcttttttaaaaatctgattattattattattattttataattattatcattattttggtttttcgagacagggtttctctgtgtagctttggagcctatcctggcacttgttctggagaccaggctggcctcgaactcacagagatccgcctgcctctgcctcccgagtgctgggattactgattattctttttgagacaaagtctcaccatgtagccctggttggcctggaactcatagagatatgcctgcctctgccgtctgagtgctggcattaaaagcatgtgctaccacacccaggtagattctttttttaatttatttttttaagattctttttaaaagttattatttttttgagacaggtcttatcaggccacctggaccggcctaaatcttgtgatcccctgtctcagcttcccacacattaggattatagatgcgtaggatccctgttgtccccacatctctcctttcctgtgtgagtccctcgttcctggtccatcctgagtgagggtgacagaggtcctgaaagacttcacccagctgaggaagagcatcttctctaagcctgcagaccctcgaggcccctcccttagttcccccctccccgacttccagactgctgtaccaataggctggttccgattagtttcctagccaccctgtctgtcccctcacacccgtgtccccgcgggtcccccactctgactccctcctctctttgcttccttctccccagatgtggtcaacgactcctctgacacctttccacccgccccctggtggccgcctgggccacctcccaccaacttcagcagctttggtgagcagcccttgggcacagttcctccggggcctccccctcgggtgcggcaggacgcctgctgtgacgctgaccattctcctctgtcagagctggagccccggggtcaacagccagtggccaaggcggaggggagcccaactgccatcctcatcggctgtctggtggccattatcctgctgctgctgctcatcatcgcgctcatgctctggaggttgcactggcggcggctgctcagcaaggtgggcggggtgttgtatttgtgggcagggacgggagcgcagtctggccaggtaggatctataggacttgacttcagaaacagagaccgctctcaagagcaagcatgggggctgaagagatggctcagtggtgaagagcactggctgctcttccagaggtcctgagttcaattcccaggacccacatggtggctcacaaccatctgtaatgagacatggtgccctcttctggcctataagcgtacatgcaaggagaacaccgtacacacaataaataaataaatcttaccaaaaaaaggagcgagcaataaataaatcttacaaaaaaaaaaaggagcgagcacggtgtgtgagaagaagacctccagagctaaggaggagcaagagaatttttagagggtaccctcagaggggaggagaaaggagaacaaatctccttgcctcactttgtgtcctccagccaagctctgtccatctgggctcctctaaccaaagctggagaagagcaagacccgtatgccctggacttcccatgtctgggagggtgatgtccattacggttgataattagggcctggtcagatttggtttgggtcctagggggcgacctcagggaagtggggggggtgccatgaggagagatggattctgatccaagcatccaggaaaccatgtaagcagtggtttattaatgttgtctaatcccacaacaaggctgagcgccgggtgctggaggaggagctgacggttcacctctctgtccctggggacaccatcctcatcaacaaccgcccagggccgcgagagccacccccttaccaggagccccggcctcgggggactccaccccattctgctccctgcgtccccaatggctccggtaaggcctgccttgttccgtcccgccttgtcttccgcctgtgtgcttgttgtagcccctccttctcctttcctgtctatacccagttccggtttgtcttcttatttctatgtacctccatacggtctcccccaaggttttcctatgtattacccagaatgccagtggtctcaccctgtcattgtgtcacacatttctgttgtgccctcttgtctccttacccctcaacttttgttccatccatccatccatccatccatccatccatcccacccatccatccaaccactcatccagccacccatccatcctaccatccatctatattataaacccatttgtctctccagcatccagcactcagatggcagttttagtactcacccatcatccactcacccgtccatacatatccatcgtcctttcagctctccattacccttgacagcctgcgctttcagccccataagccccagtcttgcctgattccaggtctccctgtctgtccagcctcgagtctcatcccttccccgtgtctcccccctccttctcccgacagcgttgctgctctccaatccagcctaccgcctccttctggccacttacgcccgtccccctcgaggcccgggcccccccacacccgcctgggccaaacccaccaacacccagggtaagcccctctgctgctgggctctgcaggctcccgtaccgctactgggcagggaaaagccctcacaccttgcactatgcacttttccactgtggccttttctttgctctccggagctccccatccggaagctctgccacccctggagccaaggggaaggctgctggtcctagctctgtcccctcctcctctcacactgctctccagagctagagaggatgccgctgtagcccgctcttctgtaactcctcctttattctcccctctctctagagctacaaggaggagggcctcaccctgggcgcttgtcctctcccccctgtgtcctctctctgcagtcccagaggtgaaggctcatgctgcccctcctgtctgctccccctttctctgtgttgctttctcatgtggccctttccccagggcctagaggggcagctctgcctccctcctgtctgtaaacatcttgtctctggggtctgtgaggacctgtcaccctctcccctcaatgtgtgccctgtctcttcctgtctttgagcttggtgtgtttgggattgtcagggagggggggctgggctgagagcagcaggagctggtggtctggaggactggaacatggaggagactcgtggcttgcacctgcttcagatgctgggtggaggagggtggaggaacccctcttccggcccgacttacctagtggtcagggttgtgccaggagaccccggagggtgaaattttctggtaccttctgcttaactgtctgtgctgcccccaaagcttttgggtgtgaatctcgattctcacacctgccttctcctgtttgaggctggcagccgggacctctgggagactggggcatgaagaatcgtgctgccagggctgctgctggtggctcacgctgtcttctctccctcgcctctccagcctgcagtggggactatatggaaccggagaagccgggtgccccgctgctgcccccgcctccccagaacagcgtcccccactatgccgaggctgacattgtcaccctgcagggcgtcactgggggcaacacctatgctgtgcccgctctgcccccaggggcggttggggatgggcccccccgagtggatttccctcggtcacggctccgcttcaaggagaagctcggcgagggccagtttggggaggtaaggagtgtgcctgcccggcttcgactgtgtctagccagactagggctttgtgggccatgcttgcatgcttccgtggccagacagcttgtcatttgtgctgtgacaccccatctgacactgtggcctgggcgggcctcgtgacctagtgaatgaccttcattctccaggtgcacctgtgtgaagtagagaaccctcaagacctggtcagtagtgacttccctatcagtgtgcacaagggacaacccttgctcgtagcagtgaagatcctccggccagatgccaccaaaaacgccaggtgagacccgcggtggcgatagtgataccacatgccagttcaaatggggacgttcacacagagacccatgcgttagatggagaactacaacttctgagatcagcagagattagccccctaaatggttatccgatcccaagcgggtcagccttaaaacccatacacacaagcaacactaaatggatccggcagactgcattcatcgatgtattcacacacgagcacttagcagtaataactgaggaatgagcggccacagatttgaaagagaatgaggtgggggcggaggacgactcaggagaggttggagggggaaatgatgtcatcattaattaaattttaaaaatagatttttttaaatgctaggtaagggctagggatgatgtctagaaaggcggggcagtgggcgggggaacactgctgtggcacttctccagccttctccctgcttctccaggaacgatttcctgaaggaggtgaagatcatgtcccggctgaaggacccgaacatcatccggcttctgggcgtgtgtgtgcaggacgacccgctctgcatgatcacggactacatggagaatggcgacctcaaccagttccttagcgcccaccagctggaaaacaaggcagctcagggggttcctggggacagagagtctggccaggggcccacgatcaggtaccgctcactgaggcagggacttccgaagggcgccccaagtgggtctcctgaccctccctaagctggggagggggaggggagcgtgggctggggattgacctaggacgaggaacccgtgtccatggtcatacgtgaacgaggccaggaaggctgagatctcaggaggagcaggtgcagagacttggagcctccatgaggtccctcttgccccagcctcacaaaccatgaacttctgggaccgttgggtgggtggagcaggacctgccccattccaaacctcttccctacctggatcaggagcgacctatgcagtggttgaggtgtgggtcggctcccctccctctcccagacagaagtgtgcaaagtggggaggcgtctggactgccctgtgacctcctctttgactccttcactcagctaccctatgctgttgcacgtgggagcccagatcgcctccggcatgcgttatctggccacacttaactttgtgcaccgggacctggccaccaggaactgcttggttggggaaaatttcaccatcaaaattgctgactttggcatgagccggaacctctatgctggggattattaccgcgtacagggtcgggcagtgctgcccatccggtggatggcctgggagtgcatccttatggtgagcagtcaaaagaagcaggctgggagggggcactggctgcatctcctcatttggaagtcgagggtacctctgtatcaaggaactgggaaaaggaggaagaacagtgtgtgggaaaggggatccaggagccaagagtgggctggaggggtaagagttggaaactggggatagaaggggtcgcggaaggatagaggctcagggccagcagggggatggttggcagagaaggacagggtcagagtagagggaggggaggcaggaacagaggaatggctgagagggggtcgggtagaaggacagcctagggtgaggtctttctctgactttcttgcattctcgtgtgccagggcaagttcacgacagcaagtgacgtgtgggcctttggagtgaccctatgggaggtgctgatgctctgccggtcccagccctttgggcagcttacagacgagcaggtcatcgagaacgccggggagttcttcagggaccagggccggcaggtcagagctgagggagggatgtggcttgtggtaggggctgtgtggtgacaggaactaaggacgcctgccctgcctctcattgtatctcacaggtatacttgtcccggccgcccgcctgcccgcagacactctatgagctgatgctgcggtgctggagccgagagcccgagcagcggccgccctttgcccagcttcatcggttcctggcagatgatgcactcaacacagtgtaaactcaggaccttgcagccctttcccgttgggagccatccgggggaagctggacactaaagtgagagaagcctatggcaccctaccccaccccaccgtctcctgacttgctatccccgagaggcagcatttctgcaggtgggctgggcctgccccaggagctgaagcctctgtcactggatacacactcccttcctgttttcttccttccttccgtctcccgagcaccacccacccagctggctctgtggttgggatcctgcctgacttcttccagccatccccaggggaaggatgggggccaatgcaaggcacacactggactaggcccactggagtacctgggccccactggacaacactggtctctggggaggcggctgtgccccggcctccttcctgtcacacactggactctgccagctgagaaactggggggactcggggacaaggaagcccaacccctacagtggtcctcagccctggcttccttctgttccgcccctgacacactggacctgggggtgatccctgccctgatccttggtcgcacaccctccttcccaccctctgtgctgcagctagaacgtctcaaagcctctatgtttctgtgaagtaaatactaggatgggggacaaaggctgggggtggggaatctattgtagctgccacattggtttttctataatcacgtgggtttgtacattttttgggggagagacacagatttttacactaatatatggacttagcttgaggcaattttaatctcctgcactaggcaggtaataataaaagttgagtttttccacagccgtgggtaatgtctgcctcctcccctcactcccagaccactctcttccctttccctagtccgtgtagtccagccctgttctgttctcatgccatccatgcccatgtcagttgggccatgacagcccgtccactcggattctctgcagggagaatataaatagtggtgtccgatgggggctggagaggtggctcagtggttaagagcaccgtctgctcttccagaggccccgggctcaatccccattgaccacatgacagctcacaactgtctgtaactctagttccagggggtttaacaccttcacatactggcaaaacaccaatgcacattaaatgaataaataattaaaagcaaataaataagcagtggtgtcaagtcaactaggagtttcactctcattcacagagagcagagctagattttagtttgaggttatcaacaataaaggtgtgatttcttttccttgtccaaatcctaggaccctaggggctggagagatgtgggtgacctttgggttaggttttttttttttaagattttatttattatgtatacaacattctgcttccgtgtatatctgcacaccagaagagggcactagatctcataatggatggttgtgagccactatgtggttgctgggaattgaactcaggacctctggaagaacagtcggcgctcttaacctctgagccatctctccagccctgggttaggttttgaaagcatgcatatgtctctagggtttgaactgtctagtggaagccatacggatgagcctggggtcatctcagtcctacaagtatgagctgcagccaccgtgaaagccttagcattcactttgggtggtaagcaaaaaacagtctatttgcaggtttggagaaagcatagccattcctgagaaataaggaccctggggttttggctgacgatattcacaaagtgagcagagtggataatgagaggacaacagtaaagctaattaaatctgaggttgaattactgggctctcagggcccaggtcacacatctaacagtctcgttaaagctacggaggtcagactactgccttaagattaaaacagacattgatgggttagagttcagaggtcagactttagaataataagcaatggaattcctggcagggagccatagctcccagagctctgtgcccagacttgctctaagtaagctttagaatgctgtaactctaggttcctgtggcgctcagaccagcgtgtccaaacctgcccttttcccacagttgtagcagcagccactctggaggatgagtccagtccagcaggaagctcataggtctgcctgccagatctttgttctttctcgacatttccattgccctggcacatgccgaaacgcagacatctcctaactagtctcccaggactgcttctgtcgatctctggtttgttttcagttctgccaccacggtgacctttgtttggagtctggatcttatggtcttaaatagcccagactttgtctcaaacttgctgtggaacaggggaccacctggaaccgatgcctctggcttcacctcctaggtgctggaattgcaggcgcacagcaccacacctggtcctctgtggcgtgcattttttaaattattgcatttgtttatttagtgtgtgcatgcatgtgtgtggagctgtgtatgcattgccacagtgtgtgtgtgtgtgtgtgtgtgtgtgtgtgtgtagaatttggttctctagttccatcatgtcagtcctgggtgtaacactcaggtgtggtggcaactgcttttacctctgagccatttcactcatccctttatcacatcttgcttattttatgtatatatgtgtattttatatgatgatgatgatggttaccatgctgggggttgaacccagggcctggacacactaagcgagcactctacctctgacctatactcctagtcctttttctggatcctgctgttgcttcgttcaggccgggtttcactgagtagccacagctggcctggctgcctatgtagatgaggttgtccttgagcacagagacctgtgggcctctgcctcctgagctcacacacattgtgtgtgccaccatgcccggctgttgtttgctagcaggatctcactactaaaagtcctcctgcctcagtctcctgaatgcttatattcgaagcgttttccaccaagtccatctctgattgattttttttttcaaacaaagacagggtttctatgtagttttttggagcctatcaggctggccttgaactcacagagatccgcctgcctctgcctcctgagtgctgggattaaaggcgtgcaccaccaatgctcggcttctgattgattttttaagaacagaaccttgtccaaggctggctgtcctgttcagcacactctcctgcgtacaatactgtcctttccgtttccccgaggccacagacctccccctggcatgtggcctctgcagcgtgctgttgtcctggaacagtgttctctgttttttgtttttttttcttgtgttgccagcccttcaacaatctcatctggacaggtcagctctccagtgttgctcttcagcccatggatctcttcttagttcccttgcatgccctatttcacatgtatttatgtgtgtgggtccctacgacatgtctctcctcggctgtgagattgtaagctgcaaaacggccaatttaaggaacacagggcttaattcatttaaaaaatttcaagggctaacataaaaagtatagagttagggaagcatcattaggttctctctctgtctctctgtctctctctctctaagacagattgaagatctcagtctgtgctccgtgtagcctcctctcctgaattctgcaaagcagagtcaagttgaaccacccccatggctttcaccttatccatcgaggcagggtttcccattcaccccgagttctctgatagggatagttttctagacagctgctttgagaatcccatctcatacaggcgggtggctactcccaatattttatgtgggttgtgggggctgaactctggttctcttacacttgcatggctagtgcctttggtcacttagtcaccttcccagcctaccttccatgtatgtatatatcaaagtttcttgtgggctgttcaagccacttagtaattcgcatttctccctctgctgatgagtaggtagggtgtagttcaaggccttagtatacatatgacccctcctttatcagggttgcccagccttccactttgttgggatgatttgtgttatatctaaccagctgctgacacagactggtgagcctttgccattgggttcaggaagtgtctttgttatctctgcatctaatctattctatggatgaagatttcagcatgatacaattctgtatttcttttttaggtttttcgagacagggtttctccgtaaaacatcattggctattctggaacttgcttttgtagactaggctggcatcaaactcacagagatctgcctgtgtttgcctcatgtgttttgggtttaaagacatatgccaagacacacgacttgaatgacgcaattctaatggtggctttactgggtcaaagaataatcatattaaaattgcttgtagaagctggggtggcaatgcttgcctgtaatctcagctctccagaaatggaggcagtaagatcagaagtttgcagcttgccgggtttttggttttgtttctttagacagattctctttacggctgtcttgcaactctctatgtaggacagcctggccttgaatttacagaaatctgcatgcttctgcctcctgagtgctgggattaaagttgtgctccaccaccactcctgaccctcctgcctccacctatccacccagtgccggattacaggctcataacgccacacttagctttggttttttttcttccttttcttttctttttttaaaaatactttatttaactttattttatgtgcattggtgtaaggatacaagatcccctggtactggagttacagacaggtgtgagctgtcatgtgggtgctcggaatagaacccggatcccctggaagagcagacactgctcttaaccactaagccatctctccagcccccttttcttttctttaagattttattgtttcttatctagccgggcgttggtggcacacttctttaatctcagcactcaggaggaagaggcaggtggatctctgtgagtttgtggccagcctggtctccagagtccagagccagtgccaggataggctccaaagctacacagagaggccctgtctcaaaaaaaaaaaaaagattttattgtttctttcagttgcttttgttctttagcttatttgtttgtttgtttatttatttatttatttatttattttttaaaaaaaggttttctctgtagctttaaagcttgtcccagaactcactcagtagaccaggctggcctccaactcacagaaatccatccacctgtctctgcctcctgagtgctgggattaaaggcatgcgccaccaccgcccagctcagatttcttattcttgttgggtttggtattctgtgatataagaataacagaatttaaactgggcagtggtggcaccgcctttaatcccagcacttgagaggcagaggcagggggatctgagttcgaggccagcctggtctacagaacgagttccaggacatccagggttacacagagaaacccagggatacacagaaacaaaaagcaaacaccagaatttgccccataagaattggggaaactatagttgaccttagttgatgcctttcattaactgtcctttctcccagtaaattcataaataagagtaaaccgcagctttctttttaaaattgtaatggagtcttctaacttcttgggagttggaagggccgtggaggaagagattaagactgagcatttagtagccaaataagggcgaactggactgtgttaatccctgcctcgtgcaaatgctgtgcatgagaaatatcagaggtctagaaacccaggtttgaggtctctaaatctaacgcaccacccctgagcagccgtgggtgcgcctcctgtgtgggcgggacagagagactcgctttagttgctagggaaagggagatgcgggaccaaattatctgtttttatctgtcttagggtgttcttgggggaatccaatgaaaagccagcttctctcagttggtcttccatgctgtgcctttcgggaattgtagtcaaaccttccttgcgttgctccgatggagtcgaggagaggactacaattcccaccatgccaagcggcaggcgagtgcatcacttattctcatcccctttactcttcacacttaaccctgctctcccttcccattggactggtttttgcctggctcctgtctgtgaaagacttcctggttctcccaccgttttttctcgtctttttatttccagaagccaatgcgagacattggctctgattaagcgacggctcgtgacccggggtacgcaagggagatccgagcggtaggggctgtgagagggcgtgaagttggcgtgaaaggaaagccagggggaagtgcggagcttgcaccgcgtggtctcagtgagaagggtgaagctggcttggagggaaagggatagaaagggatttagattggtgagcatggaggtaatttatagccctgtcttgacagattaggaacttgtagactgatccgaccaggagggtggaggagagaaagagaaggctgtgttcaaattagcatctttgtcactgcttagatgaatctggggcgtcgttgataatgcaaaaacaattttgcaagtatggaacaataaatgatgttgtcccttgtccacactggtgaggatctggatttggtcctcaggaccgtacacaaagaaggaaaatcccaccagttggagactgagagaagattgaactttagaagagaagcgggatgaaaggccagctatgttacgttcctgcaatcccagaaagttcaaagtgatcctgaggggcttgatgaaggagcaggaacatgcggggtttgggagcaataggtgacgagtggtaccagagaggaaaggtatagaactgatgggttagagtggaccggataggtctggagtcagagtgacactggcctggattgtgggggtgtacctctgacttgtgtacctctcaggtgatggagatcacccctgcaaggggtggactgaaccgagcacacctacaatgcaggaatctacaggagttcctagggggcctgagccccggggtgcttgaccgcttgtatgggcacccagccacttgcctggctgtcttcaggtgaggagcccttcaaagcgaggaccgtggtttggagactgtaacgggctctgcagagtggagttagttactcatggggagaggcttagcctagtgtgactaccagcctgttagagattactccaaagtgtggcaatctaaaacgaggtgggagatggggtgagatgcctgagaggcaaaagagggcagaggtgcaggcgtgaggcagcttctggtaacatttggcctctgacctttacagggagctcccttctttggctaagaattgggtgatgcggatgctttttctggagcagcctttgccacaggctgcggtggccctgtgggtgaagaaagagttcagcaagtgagtcccaagtacagcctgctgcccggtggctgcattctcagactgcacatccacgactcacacaggatctaggatcaaacctagggcgtctcaacagtctctgctctacacagggaacacccccccccccagagtatacttgcagtgtttccccttttagagagttgtgattttctgtaactaactagttgtatgctaacaaaaaaaaaattgaaaagacaaaagaaaatgaaaaaacagctccagaagttgggaggtagagacaggaagatcagaaattcaagggctacatggtaagtttgaggctgtctgagacttcataggacccttttgaaagaaaaagaaaaaaaaaaaaaaaaaggagggggattgacttagaaaacaaaacagagagaaacaataataaaaacaacgaactaggctccatttagcattgtagtacaggcatctgatataagaaaacacagctgcaccctggaacactgttccaaggaccaccagtttaggtagaaatggagccccctggaggtctcctttctgcttgtgacctgcccctcacctctgcttctgtccagggctcaggaggaaagcacaggactgctcagtggtctccgaatttggcacacccagctgctccctggtggactccagggcctcatcctcaatcccatcttccgccagaacctccgaatcgcccttctgggtgggtatgtagtttccctctcttcctgagctaggccaggggaactgctgactacagggatggggggggggagctccttcaaaagtgcattggaccaggtgtaggtgtagggtgtagaaagtgtccccttctcatggcctgtggggaagcaggaagcagacagggctccttactcctgcccattctggccacaggggcaaggcctggtctgatgacacaagtcagctgggaccagacaagcatgcccgggacgtcccctcacttgacaagtatgctgaggagcgttgggaggtgaggatccggcccctgtgtgcctccgctgggcccccattcccgggagcccttgagacccctgtctgatcctttcttctctaggtggtcctgcacttcatggtgggctctcccagtgcagctgtcagccaggacctggctcagctcctcagccaggctgggctcatgaaaaggtgaggaggggagggcacagccactcgggtctcaaataaagtgggtgcctggggttaggagggagtgaagggnnnnnnnnnnataggtgtaaccagaaacgggtagcccttctgtgcatgtcgctaccgtcgcctctctccatttctagtgctgaacctggagagccaccttgtatcacttctgctggcttccagttcctgctgctggacacgtcggcccagctctggtacttcatgctgcagtatctgcagaccgcccaggtacgagccagggcctagggcagtgtgcccgatcttctcaggtcccactgagtcacaaccaccccagactctgcccgtcactgcctcatcccctctctcatgtctccttttgctctgcccctttctcctcagagtcggggcatggacctggtagagattctctctttcctcttccagctcagcttctctactttgggcaaggtgagtaggggggtggaggacaggcaggtaaagagacgtcatggagagatagaatgatcacagaactacctgagaaggcaaaaaaagggggaggggtgcagggggctgggcggggagtgggaggacgagtcacagcccccagctggccatctcttcccccaggactactctgtagagggtatgagtgattctttgttgaacttcctacaacacctgcgtgagttcgggcttgttttccagaggaaggtacgcacacccagccacctggctttgaggagagtggggtgttggggtgcagcagaaagcccttgccaggcccgagtgcttgggtcatttgagggggggagttaaaggttggtggttttgcactgggggatctgatgtctaagaggaagctgtcaggatggtgacctgagagaggactgtatttccccgtgtccttccagaggaagtcccggcgttactaccccacacgcctggccatcaatctctcatccggtgtctctggggccgggggcagtgtgcatcagccaggcttcattgtcgtggagaccaattaccgactgtatgcctatactggtgaggctggaggttatggccgtgtgtgtgtgtgtgtgtgtgtgtgtgtgtgtgtgtgtgtgtgtgtgtgtgtggtttaggagccctctggtatctcttctaacacctgagggcagggctagaggaaggcaggcatgggcagcctcctcacggctcttcacccctgggccagagtcggagctacagattgcgctcatcgcacttttctctgagatgctctaccggttccccaacatggtggtggcacaggtgacccgggagagtgtgcagcaggccatcgccagcggcatcacagcccagcaggtatccctacttgaagtggaggtcaaggtgggaggaggtacccccgccatgggagcatagcctcaggtctgtcaggtccccgtgtctaggcaaatacaggagatgctgtcgcagtggcattcggtgactgccctgatggctttctgcatccttgtgtcttcccagatcatccatttcctaaggaccagggcccatccggtgatgctcaaacaggtatggatgggtaccaggatgctggaggctggcagcctgggcacccagcaagaagaggatgggtgagagcgggtcagccaacccacagagactgctttaggcacttgccctgggtcctatagctccgccccttgtccgcccgcagactcctgtgctgcctcccaccattacagaccagatccggctgtgggagctggaaagggacagacttcgtttcacggaaggtgagtggcctctgctgacctcctaatcttggtcactgactaaagaggtaaggtcagcaacttggccgcgatgagtgagaagggtcttgtgcattttttattcccttcctccacccccaccccgagagggggagagaaaagcccgtcctttactgtgatatatcggtagcaggaactatgtcccaaatcggtgcggtttggatcaaactagccaggtgagggtaggaggcagggaaatccagtcatctccccgggtaggtttgcatggttttttcttgtggtattctgttgtcttttcgaacgtctggatgccacgggtgttaaggttatccacagtgatccgtagagaatccgttcttaaaactgtggcctgctgccccagcggagacgccgcccagaggggaggggccatggccaccgcagcccctctcacctcctgcccgcccacccgaccccaggcgtcctgtataaccagttcctgtcgcaagtggactttgaactgctgctggcccacgcgcgggagctgggcgtgctggtgttcgagaactcggccaagcggctgatggtggtgacgccggccgggcacagcgacgtcaagcgcttttggaagcggcagaagcacagctcctgagccggaccggcggacgggcgagcgagcgagcgagcgggctggcagcttcccaactcaggcgtattttgtttacacaccgggacatttcttgtttaataaaattaacggaaaaaaaaaataagcggttccagacacctgcacgcgttttcccatccgaggctgtgggacccggggagccagtgtctttttcgcacgcgccggcgggttcccgcccccccccgnnnnnnnnnnnnnnnnnnnnnnnnnnnnnnnnnnnnnnnnnnnnnnnnnnnnnnnnnnnnnnnnnnnnnnnnnnnnnnnnnnnnnnnnnnnnnnnnnnnnnnnnnnnnnnnnnnnnnnnnnnnnnnnnnnnnnnnnnnnnnnnnnnnnnnnnnnnnnnnnnnnnnnnnnnnnnnnnnnnnnnnnnnnnnnnnnnnnnnnnnnnnnnnnnnnnnnnnnnnnnnnnnnnnnnnnnnnnnnnnggcagcgtgcccgcccgcaccccgcgtcctcctgaagccgaccccgaccccgaccccgactgcttcccaaacactcccgatgcctcatttacctctgtcccctctccggccaccgctctgggcgctgaggcccgcccgggggctctgcaagtcccagcaactttgtacccagccagagctccaaggctcacccctcgcgcggaggaaccgtgaagccaaacagaagcgcctgcgggagaagcaggcggccctggaggccgggctagctgagaggagcaaggtcaggggtcagcccttgggtcttcaagacttgggaaggggctgaaggagactggtgtactgggaattgcaaagcacacacacacatttccgccttcctacagtgtgtactgggaattgcaaaacacgcacacacacacacacacacacaaacgcacacgcacacacaccatttccgccttcctacagtcacctgcagtgccctcgaaagcctggagtcacaaggaggtagtattgtatgaaatccccaccgagccaggtgaaaagaaaggtacgggttttttgtttttgttttattttattgctctttggcctgctgaaatgcagttcagtagtggatctcttgtgtttgtacagatgtttctgggcccctgcctcctgcttacagtccccgatatgttgaggcggcctggtaccagtggtgggtgcgagagggcttcttcaagccagagtatcaggttagtgctgggcctatgaggtcgctaggaccgataagcagcccccccaacgtggtgggcatgggtcagcttcacagccgacctttcttttgtcccctggcttcttcaggggttttgcttttcccatgttggattttctttgaaattctatcatcatcatcatcatcatcatcacttggttctttgagacagagtctctgtgtagaccaggttgtgctccaaatcaaggagatccacctgcctctgcctcccaagtgtgggattcaaggtgttaactaccacacctggcctccttgaaattctttttgccccgagggcgccagagggtgctgttcctcctcgggtaacaagcagtcctgtctgtgcctctgactaactcattccttgtaggcacggctaccccacgctacaggggagaccttctccatctgcatcccaccccccaacgtcaccggctcgctgcacatcggccacgctctcacagtggccatagaggacgcgcttgtgcgctggtgagaggaaggggggctgctgcaggccctggagggcaggttgaaacgaatgagaagtgagctcaggggtcccttaccgtgtttctgcctcaggcaccggatgcgtggggatcgagtgctgtggatccctggctcagatcacgcaggaattgctacacaggtgggtcttttgtcccatttccttttttaacttggttgacggagccgtctttatccgaagcagcttggctagcttttcctttgcacttggtctcacttcaggccgtggtggagaaacaactgtggaaggagcagggactgaggagacaccagctgagccgggaagacttccttaaggccgtgtggcggtggaaacatgagtacgatggcagatggcagggccacttgcatatcgggctcagtctttgcttgccccactcctgacgggtatcattcggttcttcctgaatgcctcagagcagaagatctggaactctgagcattggatagacaggatgtgtgtgtgtgtgtgtgtgtgtgtgtgtgtgtgtgtgtgtgtgtcgctatgttcgtgtcaggatggacacactgagtgtgtgtaatggatggatatatgcacatatgtgtggggttttttgttttgttttgttttttaaccttgtttctcttagatttcaccacctctcccgggcacccgggcccttctccttccatatctgttgtcacatgcttttgtctctcccacttaattacatttttcacaaagtggctgctgctgccaggcacacacaacccatggcccatgggcctcatgcattccagcacagcttgtgaattgtgaacttacctaaaacagtttggggactttgtgtgtgtgtgtgtgtgtgaatttttttctttattgtgatggagatgtcatgttacagtgttgtgcaaaataaatgtatgtatgcgctcacaacccatggactccagcttagaggtgtatgtgtgtgtgtggtcttataattcaggggccacagcttggacaccactgggtgttgcccaagacaattattcatcctgtgtggctcggagaagccaaaagtttagacacccctacagagacctttgtgtagctgttaaagctggggaaagccccaccctgggtgtggtcctgtctccaccagcttccagactctgcggggcctctgccattgcactttatttcctctggtacctggcactggtgagagcatccttggttagcgtgtgggaggtgctctggtcatgtgtactgacagaaacctccggcacaggaaaggaggggagatctatgagcagctgtgcactctgggtgcatctctggactgggatcgagagtgtttcaccatggacgctgtgagttcatgttatcgtccctgtgggttctttggggagaggaacgggaatccctggttcagctgagggaggagtccggtgtggacactcaggccattccagggctcctcagcagctgtgacggaagcctttgtgcgactctacaactcagggttgctgtaccggagccgtcagcttgtcaactggtcctgtactttgaggtcagccatctcggacattgaggtgaggaagagggagaaaggcggggctggcggagtgaggtccttggcaccggcagctgtgtttgagtttctgaagctctgtccactcgggtccatcagatggtggcatgctgccttgtagagaccttgtaaaaagtcacagaatctgtgcagtgctcagcacagtgagctgccatgactcctgagctcggtgacttcactgtggaagacagctttccagccagccctctgcatgggatttgtgtggatgccagggaagtgggatgctgtacagagaggtggctctctcacctgcctccctaaccttgcaggtggagagccggcccctgcctggccgcacagtgctccagctgcctggctgcccgacccctgtgtcttttgggctccttgttttggtggcctttcctgtggatggcgagcctggtgagcgcagtcccgagagttgccctctttcttctgcttcccattctctcgaatgcacggtgggtttctgggacatgtggtaggtttgctgtcgtgggtccttgctctggggatcctgggagaagtaaaatgcacgtggccctctatgggaacttagtgtgattctatgagagtctttcagtaaggaaagaggtgaaaggttagctaatgaccggtgctttgtgatccacagcatttgggaggcaaaggtggaaggattcaagtttaaggctcacctggcatacataacagattcctagtcatccagggctacatgaggccccgtgtgtctcagtaaaacagtgcaggggaaggttagtttgtaagtgtaccagatagttcagaaaagggcacgaggcaggatggggccagctggaccctgtctgctcccagctctacctgcatcacctgtgtgggaggagggccggggtgtcagccgacctcagtgtgtgaatgtttgtctccaggttcggagattgtggtgggaaccaccaggcccgagacgctgcccggagatgtggctgtggccgtccacccagatgacccacgatacacggtgagtaactggagtgtgcctgcaccccacaccgcagcctttcttcactgttagtcccttctcctgagacccctcctctctgctctgctgcggctctgtgctttattctttgttttttctattctgcttttccccatgctggggtcaattaagcgtgggcgtggcttccagacccagtgcagctgctgcccagctgagtctctgccacactcacggtagcagtggaggggctgccagggactgtctgctccttggctcccttgctggccttccccttcccaccctggggttctcacggtccctgtctcacacttgtgcctattcctctcccgttagcatttacacaggcggcagcttcgtcaccctttgacgggacagcttctccccctcattacagacaccgctgtggagccacatgtgggcacaggtgtgtggaagggcgaagggagagccccgagagctgctggtgggactgtgtcatggcaggagggcatgaggtggggactaagcgctgcttgaaacccaaggccaagatcagggccggtctcacggcagctgttttccccaggggcagtgaaggtgaccccagctcacagtccagcagatgccgagatggcggcccggcatggcttgaccccactgagcgtcattgcagaggatgggaccagggcacccctctgcggagactggctgcaggtggggcccgccttggtgttaccccgtctcctgcgggcaccctctgccctgcctcgtctcgtctcgtctgaggcctctggtctcgtcacttctccccagggtcttcaccgatttgtggcccgggaaaagattatgtgcgcgctgagggaacggggcctgttccggggcctgcaggagcaccccatggtactgcctgtctgcaggtagccctccactgggggccttccccaggggagggatgatgcatgtgaatgacagcaggatgggctttataccctgggctagagtgtgggttctgggctggggagttctgtttgagttggggtcttgatagtataacccagactggcctggagctcctcttgcctcagcctgtcaagagttaggatgataaagggtgccaccaggccagggtcctgggagattttgtccccagctgttccttagcacgtggggcctaaccctgctacccttgcagccgctccggggatgcagtagaatacctgctgaagagccagtggtttgtccgctgccaggaaatgggggaccaagctgccaaggtactgcctgccccagagtgggaggaggggagtgcctgagactcgtgcagcataggcagggaacctggtacacagtgtgctggcgatagaggcaggtggcctgacagggccagcgtgtgctctagcccagaatttttgttgagatggcttaataggcaaaagctctggctaccaagcctggccacgggagctcagtctccccgcacatgtggtggagggagagagctaaggacctctatgtgtgcatatgcatcatacaggacataaataacttcaaagttatttaattgtgtgtgtgttacggtacccaggtggagatgagagttggttcatctgtgggactagaactcaggccaagcaagctctttgcctgctaagtcatatatctcactggccacccttcggagtttttgagtcagggtctcactgtgcaggcgtggctggacttggctgtgtagaccagactgacctcagactcacggagattacctgttctgactgggattaaaggtgtgtgtgtgggggggggggctttatttccaggctgtggagtcaggggccctggagctctggccctccttccaccagaagacctggcagcactggtttgcccacattgggtaaggggggctctcataaagttggggaggggtgggggaggaccactggtcacattgaggcgtcagctggcatcctctttgacagggactggtgtgtctcccggcagctgtggtggggccatcagattccagcctacctggtggttggagagaagggagaggtcagtgagaagcaactgggcgtggcaggaaagctcagtgcccgggaaggtggcttggggtaggaatccaccagtcccctcccctcctctaggggagcctgctccactaagcccttgctcttttcagggtgacaggaaggaatgctgggcggtcgggcgatcggaggctgaggcccgagaagtagcagcaaaactgaccgggagaccagtggcagagctgaccctggagaggggtgagtgtgtggcagaggctggtcagacctgggaatggagcagacagtgagcccttctttggtaggattagcagcagaggccgaaggctctagctgttccccattccctgttttgtctcccagaccctgatgtcctggacacttggttctcttcggctcttttccctttttctgccctgggttggccccaagaggtgaggtgggctaaaagggagagcatgaaggtgggcacgacactggtgcacagagcctggctaaggcaggcttggaccttaccgctcatcttgtcctagacgccagacctcgctcgtttctaccccctttcacttctggaaactggcagtgacctcctgatgttctgggttggccgcatggtcatgctggggacccagctcacagggcagctccccttcagcaaggtaatgtccccatgcctgtcccccctcctggtccctaagtcctcctgctgaccacaccacgtcctgctgaccacaccacgtatgtctccaggtgcttctgcatcccatggtgcgggacaggcaaggccgtaagatgagcaagtccctggggaatgtgctagacccacgggacatcatcagtgggcaggagctgcaggtaagaacgaaggctcaagctcaaggaatgaggaggttggaggaggtctaggcgagagctgagaacagccctgactttgtcactcatccccaggtgctccaggccaagctgagagatggcaacttggacctgggagagctagccattgcagccgcagcacaggtgagacccatggccctctaacttggctgccagcttcctctgcagcctcaaaggcccgggacacaccgctttccctttggttgcagaaaaaggactttcctcacgggatccccgagtgtgggacagatgccctgagatttgcactatgctcccatgggatcctgggtaagcctcggtgggtggcctggcagagggtacctgtgtggacagccctgctgaggatgagatttccttgttctttccctccagggggcgacctgcacctgtctgtctctgaggtcctgaactaccgccatttctgcaacaagctctggaatgccctgcgctttatcctccgtgccctgggggagaactttgcacctcagccagcagagaaggtaggaggagaggtggcagggaaaggggtccagtcctccaggtccttatgcccttctgcttgcaggtgtctccctcctcccccatggacgcctggattctgagccgcttggccttcgcagcccacgaatgtgagaggggcttcctcagccgggagctttcgcttgtcacccacaccctgtatcatttctggctccacaacctctgtgatgtctacctggtgcgtggtagggcacagcctagcagtttccagagagagctctgtgggtctgcccagttgtcccctccttcactggcctgggctctgtagtgtagctcagcgctgtcacctgcctctcctagagagaaaggaggctggaagagtctaggaaacagggaaagaaggttgcttcagtcactctaggcaggtacatcctaggaggacagtgtggtggggttccacacagttcccatgatagtcacccagcatgcttgtccacctcagttccccagagttctttaggacatgcagtgttagctatagggctgatatcccttcactgtttctcaaccttgttccaggatagaggacgtggtgcattgtagacttgcctaatcttggttctagttccagcacttgagggaaaaaccactgtcttcttctgataagcaaaaaaaaaagacccaatacctttttcctacacagcgccacttcctctccccaacctctgggaatcccttcacagggccctgatcacatgcaaatccagggatagcatggtattggtgatgttcagtagcttagcatataccccatcccaggaaccagtcccctcgggcacagcagtgacagaaagaggcaggatgtggtgtggttggtctccttcctcaggaagcggtgaagccagtgttgttgaaggaaccctgccccccagggcctcctcaggtcctgttctcctgtgccgatgttggtctgcgcctcctggctcccctgatgcccttcctagcagaagaactttggcaaaggctgccccccaggcaaggtggccccgtcgcccccagcatctgtgtagctccctaccccagtgcccacagcctggtgagtcatggatacagggggagccttgtaataaccgaaggttgtgggactattgccacttggccatggggctttttacatgggcttccgactcaggttgtggtgctcgtctggccagcattttacctgctgagccatttctcaggcccattttttttcttcttttgagacaggctgtcccgggactcattatgtagacccacctacctcccaaatgctggggttaaaggcatgtgccaccatgcccagccccactgttttttttatctcactaaattgcagttttcatcatcaagaattaaagtttgagctgggtatgatgatgctcgcagaaggcagaggcaggaggattttgtgagtttgaggccagcctggtacacataccagattctaggactacatagagaccctgtctcaaaagaaaaaaaaaagtctggggctagagagctggctcggcagttagagcatttgttcttgcagaagacctgggttcaacttcccagcacccacagtggtggctcacaattattccacgggagtcagcaggcatgcatgtgcgcttacacataaatgcatgcttacaaagcaaaattgttctgcatttaaatctgctactcactgggctttgtgttttggaagcatttagatttctagcccggttgggattggttggtaacttcggagccagtgcaagcatcggccactggtcctgcaaatccctgggtggcgccctcacatgttgccctgctcctggaagggaagtgttatgcttgcgtagcagcatcaatgctaagtttcccaggagattccttgctgactctgggtttcttcaccaggagtcctggcgccagcccgagctggaacgctgcttctccagagtccaagaggtggtacaggcactgcgggccctccgagccacctaccagatcacaaaagcccgcccccaaggtgaggctgggcctgggcgtcttcagagaaggggcgggggcagcaagggtgagagccgatgcccacactatccctgcctccactagtgctgctccagagcttagacccagaagaccaggacctactccagcccttcctggagcccctgggtaccctgagccactgtggggctgtagggttcctgcccccaggggcagcggctccctcaggctgggccctcgccccactggatgacaccattaagatctacatggagctgcaggtgacctgaagggatttcagagggggaggagtggaagggaaggccttagggtggagaccgaggagcaggctgtgggggtatcagacttctctccttttacgcagggcctggtggacccccagagccagctacctcggctagctgcccgaaggcagaagttacaaaaacagcttgatggcctctcgaaccggacttcatcagaggaggctgcagagaggcagcagagggtaaggctggggaagcctgagtttctggcggggcatgggtcggaaggctggctcacccaccctcacccttctccttgtccagctttctgccctccgcctggaactgtcaaagctggaccaggcagcctcccacctccagcaactgatagaagaggctcccagcgtcagggaactctgagcccacgttccttctcagacgggtctttgaggacaaatctgcctgctgctgataagatggagaccccagaggtgactgtccaccttcattttgtaaaaggaagcaaaccagaagtccctgtgacgcaagaatgagaagatggagataaaatgataaaatcctacacccacttgcttgtgagctttcatcaccctctgcctctctataggaggagggggctggctgggaacctcaggtgacagtggttccagcagttccccagacttaagagacggctctagtgaccctggaagtacctttgttccttggccctgtgcctggaggttgatatttttcctgggtatgaggggctataagaggctctggggaccacagatatactctgtgtctgagttacacaatcccagatgcagacaggtacctgcacccaaacacctcagtgaaattcagcgcccgcccaggccttctgagtggagttagctcaggatggctatttgtgctgagccttttgaggggcaggtctcccatcattcttgttatcttactaagcgccaactcaaaaagctgggcgttggtggtgcacacctttaatcccagcactcaggaggcagaggcaggcggatctctgagttcgagaccagcctggtctacaagagagctagttccaggacaggctccaaaacaatacagagaaaccctatcaaaaacaaaaaaaaaaaaaaaaaaaaaatctttttttcttcattgggacacagacatgccagagaatggaagtaacttggattaacagggattcaacctagctgacccaacaccccacctcagccgcagctttttgctgctgggcagaagtgcagggctcggctgccatcctgatctactccgttgctgccatgtgtccacacgcttaccaaggaaggaagcaggcggatcccccccacctccccagttcagtgggtgagaatccgtttaaaagtcaacaaattcaagggagaaacgggaactgaagtgtgtgggatatcaaatggagttaagcaaagacttctgggaggcgcaagaatagccaagtgggtggctgggaaagaggtcagagaaacactgagatggggcatataaagagaaacccaaaggaggtcaagagagcagaggggtgtggtggggagctgtgctgcagccagctgacaactggaatggtttgtggctgccgcgtgggcccagttacagagcatgttgagaggttagcacggtgggggctctttgaagggctggacttccctttcctagaaggcatttaacacttcccgcttgcatcctggtgaatacaatatcacatagccaagctagctgcagagggaggcagggaggtgttcatcagaagccaggctcccagctaaagtttacacggctctagcaaaggagaataaatggccatgggttcttcgccagtgctccgaaacttcacaagactactctcccaccgtcaggcatccctggtcctccaggtttacctctggtgcccacctcctgattggtccccagatgcccaggccggagacctttttggagagaactggttacccaagctccacacctgacactagtgccactgaaacatctgccagcaaggtttcagacatgcggggccggcatccagaccagagcatttgcctgccactctgcccactgaccaggagaaactgacttcctcatgaggccaggggcttaagatagaaagcagtaatccactgagtgggtcctggaggggcagttatccaactgggagggaagtagtcccagtcccactgatagaagagtcaacagcacaaccaagggccctgaagggacacgctggacctcgttacagtcgagatacatcctccaacctccggaggaccagagaccaggccagaggctggccaagggatggtatctgaggtgggggaggcgtggtgaacaggacagtcaggctggaagctgtgttcccctctagccactgtaaaccggaacctacaaagagaacgccggcggtgggtgctcaaggagcccgggcactaacccctcattctcccgaccctgcaggagtgagtggtccctgctacactaactgtgcccctgttgctcctgagggctgccctgaagaaagcacctcctttattgaccacccctagcagaaactgaagtgcttagcaaatctgcaacagactttcagacttcacagcaaggaactggcccatctcactctcgtccatgccaggatctacttttactgtttactgatatttcctactagaagccgtttccaaaaaagtcctccagttcatattgaggtcagctctatgcacagaaaaataccaggtgttcctttcttagacccacgatcacagagacccaccccagtaagggtagtctacgggatgctctgccgataacggccacctgtagactagagacactggaacatcttccagatcttgtctcctgctccagagcatccttttgagattttactggcctggtatgagtacctgtaccctctcctttctcagtaggaccaaaacagaaaggggggagcttgttcagattagtgaatcatctcccctatataaaattcaccacttgttttttcctttcctttagtttttcaagacagggtttctctgtggctttggagcctgtcctggcactagctcttgtagtccaggctggtctcgaactcacagagatccgcctgcctctgcctccagagtgctgggattaaaggtgtgtgccaccaacgcctggcaaaagtaaaacatttcatttaactttctttccccctcaaatttataatctgtaagcaagctcagcacttggggtgaaccatttaccacatgtacctgtgatctagagaaacagaaaaatgagcctggagatgcaaggtggaaagagccggtggcaccctcaactccagcaggctgagctcagcagcttggccagaatctgaccctggggggctgcagacccagtgctgggatggaacccagggccttgtgcaagtctaagcaagccttcaacccttgaaccccacccacagccctacagcctgctcttgctctgtttcctccagcactccactctcccatagcctttagatcctcaaagctcagtgtcttcagcaaggccaggcgagagtaaccccccccacacacacacacacacgagataggggtggggtcttgcctggagtggggagatcctggtttagaggatagggtatgggtggggaggtcacttgttctattagctcagcggtagccatgtgggttctgaacaaacaacaaaagcccctcagggttccagcatccagcaaaaccttcctacccccacccccacggaactgctcacctgtggctgtctccacctgaatttcagggacttccaactcaaagtgagtttgccatcactttcctctacctcagaaaatttcaagactgctttgaattttcctaagctacaacagcttaggaagcagtagaggcaggcagaagagatggctcagctcttcagagaacccagagttcattgcctgtatccccagctgaagcctctttccaggcaggggcgcacagattaaaaagttgagcaagtcttccctgcccccccccccacagcccactcccaggtccctacacttagctcaagggcctgagagccaggcagatgagaaagctaaggacctgccccatggccctttctcaggtgtgctgagtggggagcatgtcctctccaacccttcctccccagggcctaggagtctggtttgttccatctctgcttaggagtggtttgcttaacccgccccccggctctaagagagagatctcagtgtagccacggagttcaaagcggccgggcgaatccttactcctggaggaggtgggactgactagggctcccatcagctggtcttggtcagggtgtccccgtgctcagaagggacccttggagtgctagatgaatgtgctacttccgagtcctggtgattttcaggcgggtatatcctaccttgaagttttctcaaatcctggacaaggtgcccgataaaatgttatcggggtgctgctggccatacatgggttgctgagtgtgccccctggagaactgaacatcagagaaagacagaagaccaggcagcagaagcaggaaactaacaggaagctggcttgggaattgtagagggtccctgggtcctccccctttcacctattggccctatttagaaaccccatctccatgccttcctggcatttctccttgaaatatcttctgggaataagaaacccccattccacccagcagtggtggcccaggactttaatcccagcacttgggaggcagaggcaggcggatctctgtgaattcgaggccagcctggtctacagagtgagttctaggagatcccccggctgttacacagagaaatgctgtctcgaaaaaccaaagtgttggggggggggaagcccccatctcagtgcttttattttccttgtctacatatgtccctccagctccccctcacagctatggtgaaccccaaggcattatctccactctactattctaggaaagaaagctggaaaggacacctggtgaccacaagtcttgagctctaggagctgggtggaagaattgacgactgtccactcctcaggcctgagcccccagctggtctggagtatgtacacctgacccatagggaccacctccctactggtgcagtccaagggcaggtcgcagaacactgggggccactggggacctgtgggttagctcttcttgatgctacaagttccaggacagttagaaagcaaataggcaaggcaaaatttctactcctgtttccttcccttccatgcttcctcatcttcagagatgttctctctggagtaccctgcacctccacaggagccagctcttagatggggtgatggtggcatgggcggggactggggaggatagtagcagtcatctcaacactcccaaggggtcgatcaggtctaagctacaagatttagtcagtgagaagccaagataatttatcttgtttgtttttgaggcagagttccactttgtagaccagactggacttgaactcagagatctaactgcctcctgagtgctgggatgaaaggcgtgagctgctaagcccatctcaagataatcttgagggaggaagtcagtaaaaacaggaagaagactctggatctcctgagaagatttgaaccattaaggctgggtctggcatccgtctgtcccaaatgtgccaccaacagcatgacaggttctgtgtgtggaaagtccctccagagcttacccacagtgttctcagaggatacaggcaatgtcaccatccccatcttgtggacgaatagaagcttggagaggaccgacccttctagggtgcctgtgatcccaggtccgggtaacaggcgtcacacactcctctaaggctgccccccctcccccagcactgggacttgctggctgcttctcagctgtgctcttcacttccctctcagctccctctaccctgccttccccactgaccagtcgtgcaggccacacaggaccctgagatgttccgtccacattcctaggggttcctgggcctacagccccaaacttaggacgaagggctgcaattcaaaccctgcttaagctaaggcctctgcatggtgcctggtttcctcgatgctattggacttcaggagagcaagccctccaagcctgggttttctcttgtaaaaggagacgatgtggcagagtgctcagggttgccacggccatcacacggaaaagctggggacaaagaggaccacaacaggataggcattctgtgtgtgtgtgtgtgtgtgtgtgtgtgtgtgtgtgtgtgtgtccatctgtgtgtatgtgtctgtctgtctgtctgtctgttcatctgtctgtctgtaagttacctcactcttcatactccaggcctctgtggtgtacagggagagtcagtcagttagagagcctggcatgcagctccttgtcctgtctgccctgtgctcacagaccccactggacacaccaagccagtcattagatcccacgtgtttattagcactcagcagggcaagagcctgctccatcaaggcatgctcactcccagtgcccactcccggaagcctgtgctcgaggcccacacaggctcagccgccctcaggttctacaggttagatggtgtggtgaccctttgtgatggagggtcatgttggcccccggcgggaggcggaggaggaggcagatctggggaagcaaaagtgagtagaggacaaggtgttgagggcaccccactccccactccccgctcagctcagccagcccgcgcacagacccccagggactcagagacgcgcacagaaccgatgtcccctttctcggaaataccttttggagcaagtccagaaagctggagtcctgggagaccttggcctggaaaacttctgtcagctttactttcaaagtcacctttggccctgggaacccagaaatgtgactcaagaccctgcagtcagggtggtgttacccaccaaggaggcatgtcccacatccccccagactccagtgctattccagatcaggctccgtgccaaggaatcccctcccctctctcgcctccatgcccaccctccaagcctcacctgttgcttgtgagctgtagaggagggccaggaggaggaggaggggcatcggagaccccattgtggctaccttacttctctgatggcagaagatatgtcgaaatggcctctcttaactccagggcccttgctgctggtgttggggcatcaagagagatggcaagtggattctcccaaagtggttcccatgactctggagagggccactcactggctcctgggtaatgtagagggtagctccctccccccattgtttgcttcagatctctgaagagagaggggtgggaacaagagggggccttcctgcaggtgtcaggccccacctaaacctgggcccctccgtggttcttgagggattaatgattaactgttcttagctgtcatcattcctgccagagaagggctctggaatgtaggccacaaagggagggggtgggtgaggcctcacctgccccagtcaagaggcatctttaatgtcccagcctcagtggctttccaggtgggaaatctgggccctggggaccttccacctttgagattttgcttttattttatgccgatgaatgttttgcctgcatgtgtgcagtgctctcagaggccagaagagggtgtcagatcctcctgcaaccagagttacagacggttgtgagctaccatatgggtgctgggaatcaagggctcttaacctctgagccacctctccagcccctctgccagactttttatgtgggtgacagacatggaacctaagccctcatgcttgcctggcaaacacttttaccaatgagctcaataataactgttaattggtgccgatgtgtggctggtgctaatcaccactgaagtctggtgatatgggcacgctcttcacagaggttgctgagccatgggtgagaggattctgagagcatcaattgtgtgcattcgtgaagcatcaatcgtgctggacaagcagttctattgctatgagggcctgggttgtcacaggaagcaatactccacagcaagagccaagagctgggcagctggcccccaggccccctgattaggacatcctatccacttaaaaaaagatttattatgtatacagtattcaggtgtgttgcacaccagaagagggcaccaaaatctcactacagatggttgtgagccaccatgaggttactggaaattgaactcaggacctctggaagagcagcaagggctcttaacctccgagccatttctccagtcctgacatcctatccatttttcatctcacagacttgccagttctgagggagatgagtttggggtgcagtggtgacctcttacactgccaccatcaggctgccagccagcaaggctcatgaggggtagggctgagctggctaagagccatttgccctctggaaaaagcaaggtggcattgctgacctcatcagttctcacaggtgagatgtttaatgtacacagagatgctgggccaccctgagtcaccaggctccggtgactggctcctctgtgtcctactcaaagtcacctctttgaccgtaagatgccatcttgagccaggcatggtagtttcttcctgtaacctcagcaccgaagcagcagaggcaggacaaccacgcacgaattggaggtgggtctggccttcatagtgagttccaggtcaaccaagacaagataccaagatcctagatcaaaaaaaaacaaaaaaaaaaaccaaaaaaaaaaaaaaaacaatttaatagccaggtatggtagtgcatgcctgtaatcccagcacatggaaagtggaggaggaaggatcatgagttcaaggtcattctcagctacatagcaaaatcaagtccagtttggagttcaggacaccttgtctcaaagcaaaacacacacacaggcacacacacacacacacacacacacacacacacacacacacacacagagagagagagagagagagagagagagagagagagagagagagagagagaatattaagccaagtaaaacaaaaaaattaaaaaaaaactaaattgagaagatagggctagggaggttgagaacactggctgctctcccaaaggacgaggggtcagttcccagcacccacatgataactcacagctgtctgtaaatccagttcagggctccaactgtctattgttactcccatgggcactgtgcaaaagtgaaccacatagacacacatcaggcaaaacacccatacacacataataaagcaaacttaaaagaatggcacctagtaaattgtttttaaaaagaagcaaccaaaacaaacaaacaaacaaaccccaaaactgagaggcaccgggcagtggtggcccatgcctttaatcccagcactcaggaggcagaggcaagcagatctctgagtttcaggccagcctggtctacagagcgagttccaggacacctagagttgtaacgtagagaaaccctgtcttgaaaaaccaaactaaaaaacaaacaaacaaaacaaaacaaaaataccccaagaggctcttctctagacacctgggtcttctgtgaattgtggccaaaggtgggaggaggggatttgttcacaagcactggctgaaagcttattctaaaacaggaatccttgcccctggcaccattgacacatcaggctggtgattcatcaatctggaaggtgttccaagccataccaggggccaatagcatctctagccacctccttctagataccagcagcctgcatctcgcacggatggctcctagaattgcagcatctctctgggggaggcaaaattggcccttctcacagtgtattggggttggaaccttagaggaagaatgggttagaagaaaggagtctggatggagcctcagggaaaggtctgtctctctctgttttcagtttccacaccctggaggctgcacttttgtttcacaccctgccccattctgagccatcagtctcaggcacaactacagaggctcattaatctcccattaattgagctaatgggcagttggcttcttctgccctttcctgatcgagccctgcctaagggtgtagcaccagtcataccagaccactattcctcatgagccccagaggcccaactccaggcctcctacctggagacctcaggtcactctaccccctctgctgcctacctccctcagggagcaacagccctgcttccaactcaccaggagactctcagtttttggggtgctggactctgagcccacagccttgtgcatgtcaggcaagtgctctccactgagccacattcctgacgctggtaaaggaccactgactggctgtctcctgcatgttgggcattgtctggggctatggatgtgatggggacaaagacattgcctcggggtgctcacaagtaaactaggtttagggaagtgtaggggctcctctctctaagagccccactggagctggtctctaagctgatgcttgctttagatgggggatgagtgaagtctcaggtacggggttaaaggggatatgcaggtgattctctcttgagccccacaactgagacctttcaagggggaaaatgagggggtggttggaacttgtagcaataggaggggcacatttctaagcagggatagatgcagccttgaggcagaggcagccgctgggctgggatggcaggggaggggtaggcaggacagatgtccccaaaggctagactaatgatgtcagtcccagggttccccgcctgtcttgtccctgtccctgtctcagctattacctgacacatctgaaagcagctgtgagtgtgcagtggaccacgggagggctgcccccttctctgctctttcacctggtcttggggacactccacccagggcagaaagtgtggccatgtgtgagtaaggggtgtggagctggatgacgacagagaaacaggagggtgagtatgtgcctcctcccagagcctggacctgtcctgtgccccgtccaaaccttctagaacatgagcattggctcagagcctgcaggccaccccatacaagccattaactctttctgcagaggctgggtaagaaagcggcaggctggctaccccacccaggtcctttccatgtcctcagatcccagccctttggtggaacccagggacccagctgtatgacacagctgcggtctcccattatcagggcgcccccatgggtggggcagctccatttgcttaaggcttagctcagagtagcctcagcccccatgacgtcaaacctgaccccttataagatacagggcccccagcccatggtctctcagcagcctcccagctctgacatggctcagctgaccagtggcctctgttcttcttttggcttcatctgctgcctcttcttcctcccagcttcttgggaggcaggtaagatgcccagagaggtaaaggggacaccgctatatggggaggggtagaaatcacaaagggtcttatttctcggaattgacggggctggatgcactcacggaaatgaatgaaggccagtggtgtggatggccgtgaagtagcctagcgtgtccaggccatgcacgagagggatctaatcccggtgtttcttttgggacgtctgaggggctacacctgctcagagcttcaagctgtgtaaagacaccgtgtgggcgttagttctaggtgagcgagggggcacacactgggcactcacagcatgtaaggaacccattgatgctcacagtactccatctcccactgtctccttaatcccccagagggacaataatatccatcttacccttataagccgtgcggagggcaagctttgtggccaagagcacagggtggtccggaaggttctgtacagacccggctttttaacttgatccagccatgtagcttacctgtcaatggtacagcaggaaggatgctggcagcctatgccagtggctggggtacaacctactctgcaccaggcgtggtttgaccctcacgacagctcagtgaggttctgtccccatctgataggtggaacacatcccaagacttggataagaaaagtttgcctctcataagagatgttaggggaggaggtggcaatgctaggttggttcactagttaaaagacgatgctgggacgggggtagagatgccgaatgcaggggcactttgaggcagtctgggcatttacaggagggtctttatcatgtgaacaaaagtgcagagtttccacatctctagcagatgtgaaccccccccaaaccagagatcttggggtggctgcttctgggacacagtgagcagcatcttcttccaataggcccaactaggggtgactctaggctggggctcctgccctgagctcagggtcttgctggggtcccacaggatggcaggggtgggagctgagactttcagcacctctaacagacctctgtcggcatttgagctgctgaccctgctcccacccagagggtcctccggcagagcaccggagccagcctcagtttccctacctgcttctcttcccctgtatcagtcgaggtccacctggtgtcaagccgctgcacaagcggaacaaaccagtagggggcgcagggaagcacgctcaccctagtcacctggagatttgcctcagggagcgagcttgcaggttgcgagcttgcggggcaggatgcagggagagactggagggtatgcaggcacatctgagtgagacggtgacaagccggggagtgggggcacaggctggaccagggtggggcacacgacggtgtacaacggagagagaaatcaggagagagaagagaccactcagggtgtgtgaagcccctgtactgttctggcccagcatctatccacgggacctgttggttcccagactcaggcagggcacagaactccagagcctgtcagaggaagtccaagagattcaggggcagcacccagattaaatcacaacagggaacttcaggcaggggaatgtgggaacggggagggggctgggggtgcagctacaatggtacagttcttgccaagtatgctccaagccctgagtaaggtcccagcactgtggtggtgcacagctggaatcctaacactagggaggtagatgcaggaagatcaaaaattcaaggtcatcctggtttacacggtccagccgtgagaacttgcctccaaataagtaaatatttttttaaaaattgacacctaccccggacttgatagccagccatcttcctttcacacattcattctgggaagtcacttaacacagaagatatcactcctgggtcttccagcctttggtttttgtttttttcaagccagagtttttcatcagtagctatggaaccagtcctggaactggctctatagaccaggctgacctggaactcacagatctgcctgcctttgcctcctgagtgctgggattaaaggcgtgagccaccaacgcccggtggggactaagcatttaactcctttgggggcagtctggctctacgctgtggtgcctggaaaatggcgctcccaatcactgagcagtgaggggagcaacagtgaggcctcctccttacacctgtaaactcagttccctcctgggacttgggcgtctctattctcctcatgcccttgccctctcttcccatgcttctctctaggaccgaattctgagcttccaatctcttggccgggtgtgtgtgtgtgtgtgtgtgtgtgtgtgtgtgtgtgtgtgtctcagtttcccatggctggaaatgggtccagatcccgggtaccaccctgagccaacggcgttgacgatctcagctgtgtctctttactctgaggtaatctctggtctcctgctcttgtgtcagaatcagagacacatctctccctcgtttcttcattgaattaaggcgcgtccctgatagaggtgtgtttcccttcacaccctgtccctaaacagaacccctcccagaatccagcggccttgctctccactgtcaggatctgccaggagaaactgttttctatcaccctcatctattcccagacatgtgcacaaagaggggggcccaatgtgggtggactccaggggctagactgcctccctccactcagaccaaagttcattgccagaatggaagtttccgttttcctccccagtcctcttcccccttatcctcctctcacaacctctccacctggacagttctgccaggagtctgcctcagtttctcacattgtcacacttggaatggaactgggatattacaggaacacaaagattctgagatggattcaatttcctctcagctcttccacgcaaagggagttctaggaaggtgtgttaggacgtggatattgacaggcacgcaagcaagtgaaataattggaggcgttgataacgatgtttttgactgagactgtgtcagcccatgggaagaccaccagagtctaagcaatggccatgggtatgagggagagaccatatcaaccaacgagagacaactagatctagaaccaagagaggtgccagatctgagagtgaaattcaggaatggatttggggaaggaaaggctacatttttgctcaaggtacagtttgagcaaaagttcagcagctagaggtgagaatggggttaaacagtgtggtgtcctaaagaaccttcccggggaggcagctacacatcccaaagatgcctaacagaggcaggaaagattttagaaagtttcttatctgtctgtctctccacaggtgctgctacattccaagaaccccannnnnnnnnnnnnnnnnnnngctgaacctccaacatctgaccatccactcatcctcactccaggccttactcacaggtctccttctgcccatgctgatcgggacccaggacaacaacctccaggcctccctaagtctacaacaacccagaagcccaaaaaaccgtgcagcaccagacgctttgccaaaccagttcataaacccatagacaactccaaagccacagataaccaaaacaccactgttcatcatgaaatgactccccctatggaaaagaatgccagcagccaaagaaaagaccggaatggacgctcagccaatgaccccacaaaagcatcagagagaagccattcaacctcagcacccaggagaaggacaacttgtaagtccacaacaagcaaaaccagagtaacgaggaactcgggtacaccagtgaggcatacggataccagcactaggcgaaggaccacctcacacaaatccacaactccttcccatgactcagcgctcagtagaaaaaccacaccttcctcaggaaactcatcagaagctccaaggacctcatacaggactccaaggaccccggcaaccacaggagctgaagatcacaggactccctttgccacagacaagcctgcccaaatgactacagaacacaccaaagagaccacatcagccagtgacaagaccataggaacccaagtgactctggcagatcatgagggagagaatatatcaaccaatgagaggaccaccaggtcccaagcaacagccactcagtctgaaggagagcctccatcagccagtgagaggaccaccaggtcccaagcaacatcaccaacagccactcagtctgaaggagcgccttcatcagccagtgagaggaccaccaggtcccaagcaacagccactcagtctgaaggagcgccttcatcagccagtgagaggaccaccaggtcccaagcaacagccactcagtctgaaggagcgccttcatcagccagtgagaggaccaccaggtcccaagcaacagccactcagtctgaaggagcgccttcatcagccagtgagaggaccaccaggtcccaagcaacagccactcagtctgaaagagagcctccatcagtcagtgagaggaccacgggagcccaagtgacgcctatagaacatgataccacaccagctgatgtaaagacaacacaagtctcagcaaagtctacagaacacacagaagaggccacaccaatcacccaggaagccacacaagtctcagaaagtcccacactattctggaggaaaaccacaccggccactaagactgtaacagctataggaaacccagggaaaacagtagcagtcttcacaaccaccagacctccagtcagggccacagaggacaagtctactgctctctctcctcatttccataaaactgagaccacacacggggaactccttagccctgtgacaactagaacagacctgggattcatcacttcaggagctcaccacccccagcagaacagccacagctcacctggaagcctccacgctgctggggccagcagggagagcaattcattccctgcatgggccatagttactgtgaccctcttggcggtgattgtcctactgatttgcattggcctgatcgttttggtaagggcagtggggcgggtggggatgggggtgacagagacgaggagagatgacgggtcagaggtagagagttagagctggggtggaatgtgagaacagtagaaaaccagcaaatctggaaaaccacaggaacggtcggaagagagggctgtggccgaaatggaagggggtatgtgagagagaatgtgcttgggcgtgaggtttgggatataaggaccagatggatagggcaggggccgggttgtgggtggaatatgggactctagtggatccaagtctgggatatggactaaggacaggcaaaaggttcaggaaaagagagaaaagccccaagggtggttgatgagatcaagggtggtgatcgtattttctgtcatctcaggtcgcctgcacatcaagaacacgccgcgtactggcccagaactctgaggattccgaccccgaggacagagggggccgcaattcctaccccgtctacctgatggagcagcagaacctgaaaccaaaccagatcccttcccctccgtgaccttgagaccttcgtctccaactcttccaggcttcgcccctttcctggaagatgaattcgacttaggactccaacttcctggacttagaaagggcagcaaaaattggcagataacagctgcaaccctcgtcggccacgttttcttaactgactagttgaggagccaggtggtaagggtggcagtgtgcatttggaggaaagggaagaaagagtgaataacgcaagcactgtcagcagaactggtgctgtgagaacaaggccaaggcgtttaatggacagcgggggcgggaccaggacaggactctgagttctgagaggcgtggccacatgaggcatgagcacctcagaagacaacaccccagagtgaaggagaaccctgggaggcacgaggaatggggggcaacggctcgggttttaaaactaatttatagtaattctgtccacccccacttaaggtgcacactcttctgaactcccagaatactagatcttatttttttaattaaaaaaggactcgagaataaagaaagatcgaagtgttttctttcccatcctctccattgcttggagagagagagagagagagagagagagagagagagagagagagagagagaggaaaggaaggaaggaaggaaggaaggaaggaaggaacccaaccctgcaaagaccacaaaactcctcctccccgcggttcttccccgctccttgtgagtcccttggttatcctggatgtctgcggtggattttctgtttgtgggtggctacacacagaggggtttgtgcttgcctgcagtcttacccacccgcctcgccccaaccttccctggtgatgcatccactccgcaattggattcccgcaccagtcaccaaaagttggcgctggcttcctcttgcagagtcagcatcttctcccgcagcgcgaccctctcctcagtctcccaccgcactctgactttgctttggggatcttctttccaacttatcccatccttttacctggtactgacggggccgggcgcagtagaaagaggatagcgccctctgctggacttccgtaataaagccgaacgcatttgtaaggttcagactgcagactccgtggactctcaggggaatagaactgacaccctggttcagtgaacttatgggtgaccctgggcaggagaggttgtagggcaggacgggagttctttgatgggccagagagaggagacagaatttctattgtttctaaaatggccatttctgggcttaggtaaaagctcagttcaattcattgtgtatttatctgcacggtgacaaagggagaggggtgggaattcagtattgataagaaaggttttatttattgattgatttatttttaatttttagattctgtgtgtgtgtgtgtgtgtgtgtgtgtgtgtgtgtgtgtgtgtgtgtgtgtgtgtctgggcccatgtgtagttacccttagaggccagaagagggcagaagattctcctggccatggagttattaacaggaggttgtgaactacccagtacgggtgttgagaaccaaactcaggcctctgtgagtgcagtgcttgctcttagctgttgagccctctctccagccccagaagcagcatttctaaacatccaacatctatagtttgttgatataaagacatatatgacaaggttcctgcctgagacagaaatgcaggaacactaaaaaccataagtcccacagaacctgcccatcacctgcatagccttgacatctgccgatcctggagaaaggtggctgacaggcactcagtgtaccacaggccttccagccagactccaaccctaaccaggcagcagggtcacaggtcagtattgccacttttcatttccacatttctaggtattaggaagctcctccaaggtcagaatcccggccctgacatggatggtcctgaactatccatgctgcttctggatggatggtctctctagatgtcccatggaggggacaggctctgctgggggcagttggcagctgggcttcagaaaaaggatacctgggggggtgcagaaggaccccagactaagctccttgttgaagcctatcacaggcaggatctccaggaagaagagaagggtgtgtggtttctggttgtctgggcagatgtgacttaacagagctgtccccacacagtgagtgacccagggctcctgggatgctgaacagctgagccccagtctctgagctggattcctcccatctagatgctaataataataattatttcccctagagccttagcatccagctggtcacagttcccctggggctcaagtctctcctcactaattattactctgaaaccgcagggaagtcctttaatgagctccaggttggacccacaggaagtgtaattacgtaatgagcaggtctggggggaatacccccttttctgcacgcctgtgtccttgtgcctcctaagggtcactgcaggagctttgagtgcctaagacacagagggcagaggccagagcctaggctccaattcatcggttggcagtccccccttctcctgagctctgcctggtgggtggacttggatttcttctgtggaaacagaggagctactgtagttccggattcccttctcccatcgtgagatctactaggtcagtttctgccctactcacgggtggggtagacggtttctctcccacagtcaagccaaatgcacaaaaactactcatcttcagtgctgagcatccacagatcctggccacccctccttcccttgagctctgaaacgacccaagccccaccctcgattaccttgcttgctgtcacagtatccttacctcccacaatctccataataacataccacgcctccaccactctctctgagaccacaacggcttccatttcaacctcccaggttgtcatattgtccaccacaatgtctgcaccaatgagggcctcaggcacacttcctgaagccaccatagggtccctcaccatttctgagcctgtcaattcctcttctgcaggttctgtgtccaccttggcttccagctcaggctctgcgaccacttccactagagaccctagacagtggcagtgtcttccacagaaatcagaacacctgacatgaccaccactgtttccatgatcctggaaggggccccacgcaacaatctcaacagctccgaatgcctctcacctgggcatatctctcatgttctcaggctagacagcaggcacctttacccactgagccatcttgctggttctaggatgaagtttcaataaatttacaatggaacagggctgtgctttagggggtcaatggcaactctagactgtgagacacagttccttcaatattgtacagtatagcatagagctatctttcgttccctgcctcgacttccttcagtgatgggctgtaactgggaactgtaaacatcataaaccctttcctgtctaggttgcttttggtcagggtgttttatcaaagcaacagaatgaaactgcaacactctataatggcccaggggtcctcactgaaaatatctggaaggaaaagagatgggccagcaaatcttctacagggagttgttgaattgaccggaaagtaagcagtgctaaaattaaaaaacaagagaagccaggggctggagagatggctccgtggttaagagcaccggagtccaattcccagcacccacgtggtgcctcacaaccacctgcaatgagatctggtgccctcttctggcacaaagatgtcacatagatagagcaatcatacataaaataaataaacctttaaaaaaaaaacccacaaaaaacaatgagccaaccacggtggtgcacacctataaagccatcactcgggaggctgcagccagatcacaagagtttgtgggcagcctgggctatgtgacatgaccctagataagccaaaaacacctcgcttgacataggaggaaactgaagaaccaggaagtaagaagaagccacggaatttgagttcaaggtatttctaccttagtgggaccagtccaggtggcctgtccagtagtccctcatttaaatcaggaaccctccctgagaacacaaagtaaaacgaaactcatctttcctcgaaggaaatacaacccacggcacagggaagggaaaggaatgtacaccttgagaaaccaacaggaaacacaacagtatctaaagtgacctccagctggggtcatacacctgaaaagacctcagtcttattttttttttttcaagacagagtttctctgtgtagctctgtagaccaggctggcctcgaactcacagagatccacctgtctcctgtctcctgcctcctgcctcctgcctcctgcctcctgccttccaagtgcagggactaaaggtgtgtgccaccacctcccggctaaagacctctgttttataacccaacgtaaagaatcttcaaacacccatgcctgtgtatgcttggggaaattatgtgccttctctgagaaaggtcattgcttcagcttggccttcagataacatctacaggtaatgctgtaagagaaatccacacggcatcagaaatcttcaatgcaaacgaacacaaaataaagcatgtccaagtccacaaagactttcgatgttagaaatgttaaatgtcggccataaagtaaatgggtttaaaatgtgtgtggtggcttcagagctacccacaaacatccctggccatcttttgtttggggtttttttgtttgtttttgagaggtgggttagatgtgtactgagacagggtttcatgtaacctgggttggctctgaacttgctatgtagtggaggctggttttgaagcctgaattcttctgcctctgcctcccgagtcctggtatttcccaggcatgtgttatcacacccagtaaggttgctcaagttgtattcctggcttcccttgcatctccatgtagtgtggtggcgtagagctctgcgtgacatgcagaagactcagggttctaccccaggcaccactcagacacaaacaggcaagaaagttgccaggtgtgatggtgctcaccacacacagggacaataaggcaacagggggtggggggtgaggttgggggtggggacctgggctacgtaccaagcccctgtctcaggaagcaaacaaactcacagatctcaaaagacagaatgaacgtacttatggcattcaggtgtgaccaaggagatgagtcatgaaaattatcgaattgttccaagttccctgttgtgagcacaggttagttacttttagattctgatcagtactcacggcacagtttagactctgaatttgcatctgagatccttccctccggctaagtctgcattgggctggcaagccatcaatttttcaactgcagagttgcaggaagcctagaacctcacttgtcaccgaaggttcttagtctcaggagaggcccatcacagccacaatggagagccgcttctgggcctttcccagccagccacatcccttcctgtctcagaatcctccagttaactgccagcttcctcacagtagggcttattcacctgccagcagactgtcaggagcatgtgctctcgaatgaagcacctccactctcccaggagggtgaaaggcagtcaagctgacagaccagtagcacacggtgcccctcccacatgctccccaaaccctctgctcatttggatccggatctacccagtcacactcacttagctgaccatgtgcatgtactctctgctggcagcgtccaagcgtctagaccaaactccacactcctatctagaactcagactgtctaagtctccttccgttagacttggtcttccaaggcagggcctgtgcctcgccctgctgaatactgctgagagaagcctttcataagaagaaaagcatattggagggaggggcacacccacggttaagcttcaagaagtgggccctagggggaggtaattggcattttttggggggggggtcaatacctttctcatgatgggggtgggctttcttgctctggagagagcagggtgttatcagagaacctagtatgttcctacaaaccctttcttcatatctggccaagtgatctgttccactcacaccggcttctgccatgacctgatccaccatggcatcgaccagagtgttgtaacagagcctttacctcagacgagcagtggggctgctcaatcttggactttgcacctcctaaagtatgagcaaaatcaaccttttttttttttaataaagtatttagcttcagccattgtcctgactgactgtaattgccaacttgacagcctagcatcatctgagagatgtctggatggagaaattgcctagaatacactgacctgtgggcatgtctgtaggaaaccatcttgattattaattggtgcgggagggtccggcccactgtgggcaacagcatccctaggcaggtgagccttccctgtataagagctagctgagcgtgggctggcaagggagccagagagcgagacaggagggcagcctttctccacggcttctgcttcaagctcctcactgagtccctactctgactttctccagtggtagactacgtcctggaagtgtgagccaaataaataaatctcctccccaggttgcttttggtcagagtgcttttgtcaaagcaacagaaaccaaactaggacaggcactatgttacagcagaaaatggacaaagagaggaccccaaagaagggttcactaacaatggctgtccacacctgcaatccaggagcccagctccctgctgactgctccctttggagtcaatagggtcctacccttcagctgagattcttggggcttcctctctgctcaagccaaaccacagaatttcttgaccaggaaacaaaaccttgagctagaacgggtttctgaccccatccgtgccacaggggtgggtcccttctctctgacactcttgagctcctttttctcttcctgtttcaacccagcccagtgtgatggtgtcactcttttgtgccatccctgtgacccttgggccgctgccttcccaggctcagtactgtttccttaggtgctcatgcttggctgtctgtcaggataggtgcccagcctctccctggcccacaggaatctataaaggtggcaggagcccttcagtgatgagaaagaggagacaacctggcgccgaggaaacttaacagctcaggcatccagccaccctctccccaggaacaaagcccttagaagaacaggactattgggagctcatcttcatctcttccttcctcaagagctttctagaacttgggccacatttgggacccaggtgtctttgccggccacagggaggcagatgacgatgcagaagggaagcaaattctggtgctggctgcttatgcagctgctgcttttagggcatggtgagtggttttgtctagatgtggatggcctgggagcctctgaggaggtgggagaggctgtgacagcctctggttctccccaggagagagacccatcacttcatctcttctggggcatggtggtcaccacccagggcccagtggctacactgtgtgctctggtctcacactgcctgtgaaagggtgataacctgtgtggtgtgcgtcagtgtttaaatagtaagaagagttaactgttttttttaaatgtttatttatgtaatgtgtgctggtgttttgcctggatatattctgtatgagggtatctgaacccctggaattggagtgatagacagccgtgagctgccgtgtgggcacagggaactgaacctgggtcctcaggaagagcaaacagccatctctctagctgagttgactattttttaatgtcattttttcacattcttttttttttttttttttttcgagacggtttctctgtagctttggagcctatcctggcactcactctgtagactagactgctctcgaactcacagatatctgtctgcctctgcctctcgagtgctgggattaaaggtgtgcaccaccacccccaccccaacccaccgccagtttttcatattcttgaaaatgaatttccctcctgtctgtaattctgattccacatcagcctaagtcatcctcagagcaagaacagattccaaacaccaagctggggccggtggccaggcctgtaattccagctactggtggggctggggtgggaagatggcaagacttatctgggctgtggagcacattcaacagcaggctggtcaaagtggtgagaacctatcttgaaataacatagcacagaataaagaagaaagctcctgggtagagtgcttgtataggcatatgggaggccctaagtttgaaactcagcacacacaccacacacacacacacacacacacacatatgcacataccacacacacacacacacacacacacacacacacacatacacacaccacacacaccacactcacacatactacacaccacacccaccatacacacacacaccacactcacaccacacacaccatacacacacacacaccacacacacacacacacacacacacacacacacatcacaccacaccacacacacacaaataataacaagataaaaatcaaacaagtagagctgcatgtggttccttttgcctgaggtctcagcagccagccagggctacatagcaagactctatctgaaaatgagaagtgaccagaagataataactgcgttattggcaaactaattacaaaggcaactgtgaacataaaattcaaggctctctctgtgagaaggtagtgcaggaatcactgtctccagtaggtgggaaaagccttctgggttctacaaaagagcagaagcaagagatcccagcaggtatttggtcctcactggacttccaggaagcttcagatgttaagatgaaggccgggctactgcagtgtgtgagaaaccccccagaacaggcttttaggcctgggggcctgttatcccagcacacaggaggttgaggcaggaggaccatgagtgagtttgaagacaacctggtacagagtgagacactgactcaacttttacttcatgccacagttctgatatcaattaacacaacctggtctgcctccccagaagagggagtgcggttcctgggggaacttaccattttgaaaatcaaaccctgccaacggcagtttactttatctggcgggcattttgccgacacacatacccacgcaccatgtgcatagggtgctgagcggagcagggcgggcattggactcccgggaactggagttagaggaagctgggagctgcctgatctatgctgggaaccaaacttgggtcccctgaaagcagcaaatgctgcttaaccacggagcccacatctctccaagcccacatccagactataattttgattcatttattttatttttatgcttcaaaacgctcccagtcaaatccacccctttcacatgctgtgtctacttgggtcatccttggccgcctgcgaggcgggaccataacctgggattgtgaataaatcctccctcttggaagattgctctccttgaggtgtgttataacagccacagaatatgttacatatctatttacacatatatagcttttatcccgttacctggtaaaactctgtctcgtgtgtgtgtgtgtgtgtgtgtgtgtgtgtgtgtgtgtgtgtgtgtgtgtgagtgtgtgtgtgtacatccgtgttgaggctcaaacacatggttttgcccatgcttggcaaacaccactaaggtgcaacccctgtaattcattctttttattttattttattagttcaaattaggaacaagcttgcttcagatgtcaatcccttctccctctccctcccctcctcccaaatgtgtagcccaggctggcctcaaactcgtgatcctcttgcctctgcctccttcagcaaatcctaccggcgtgcgccaccacaaccggcccctgtaattcatttataattttttaaaatgaaacttggatttgttttcatggtgctggagagatgtcttagtagtttagagcactggctgttctcccacagaacccagaaagtggccagtaaccatctgtaattccagctttaggggacacaacacactcttccaccatccacaggcagcaggcaaacatgaatatttctaattcctcattagataattattaataactgtgtccatagagcagtcagagtactgaataaaatcagccatgcaatgaatttgacaaagcaggaagcagaaagcaattatgttcaatctacatggttattggtcatgattatatttagagaaaaaaaaaaccttctcttatatcacagtaaataccaacactacctccagcacaacctcgaactcttcaacaactatgaaaaccattgagaacaccacagcctttgcttctgnnnnnnnnnnnnnnnnnnnnnnnnnnnnnnnnnnnnnnnnnnnnnnnnnnnnnnnnnnnnnnnnnnnnnnnnnnnnnnnnnnnnnnnnnnnnnnnnnnnnnnnnnnnnnnnnnnnnnnnnnnnnnnnnnnnnnnnnnnnnnnnnnnnnnnnnnnnnnnnnnnnnnnnnnnnnnnnnnnnnnnnnnnnnnnnnnnnnnnnnnnnnnnnnnnnnnnnnnnnnnnnnnnnnnnnnnnnnnnnnnnnnnnnnnnnnnnnnnnnnnnnnnnnnnnnnnnnnnnnnnnnnnnnnnnnnnnnnnnnnnnnnnnnnnnnnnnnnnnnnnnnnnnnnnnnnnnnnnnnnnnnnnnnnnnnnnnnnnnnnnnnnnnnnnnnnnnnnnnnnnnnnnnnnnnnnnnnnnnnnnnnnnnnnnnnnnnnnnnnnnnnnnnnnnnnnnnnnnnnnnnnnnnnnnnnnnnnnnnnnnnnnnnnnnnnnnnnnnnnnnnnnnnnnnnnnnnnnnnnnnnnnnnnnnnnnnnnnnnnnnnnnnnnnnnnnnnnnnnnnnnnnnnnnnnnnngggaccagcacagcctccatgtctacacccacctcagacacagccgggaccagcacagcctccatgtctacacccacctcagacacagccgggaccagcacagcctccatgtctacacccacctcagacacagccgggaccagcacagcctccatgtctacacccacctcagacacagccgggaccagcacagcctccatgtctacacccacctcagacacagccgggaccagcacagcctccatgtctacacccacctcagacacagccgggaccagcacagcctccatgtctacacccacctcagacacagccgggaccagcacagcctccatgtctacacccacctcagacacagccgggaccagcacagcctccatgtctacacccacctcagacacagccgggaccagcacagcctccatgtctacacccacctcagacacagccgggaccagcacagcctccatgtctacacccacctcagacacagccgggaccagcacagcctccatgtctacacccacctcagacacagccgggaccagcacagcctccatgtctacacccacctcagacacagccgggaccagcacagcctccatgtctacacccacctcagacacagccgggaccagcacagcctccatgtctacacccacctcagacacagccgggaccagcacagcctccatgtctacacccacctcagacacagccgggaccagcacagcctccatgtctacaccgacctcagccacagccgggaccagcacagcctccatctctacacccacctcagacacagccgggaccagcacagcctccatgtctacacctacctcagccacagccaggaccagcacagcctccaactctggctggataaccacccacagcagctctagcctggcattttctactggaacagacaccacctccaaccccaccggcacagttggaactccagtgaatgaggagaagcccagtgggtccctaaagccttgggaaatcttcctcatcaccctggcctctgttgtcatggccacggcactccttgctggggccatctgtttcgcggtgagtgcctgatatataaagagatgcttagggaaaggaggaggaggggattacagagtccccaagtcagaagacttagatagggaggaagtagagacggggttataatctgagggatgtatccacatcctgaggagaccaggagtctgagcaaagagtgccaagaggaatggaggcgggctggggtcctaggggaggagaagatggttggagcatgaggggagagctgtggggagcaggggatggttgcagtctcatcccatggtaagtgcttggaagaaggagacatggttcttatactatggcctctttttctagagaagatgcctgtctctgagagatggtgctgacataactttctacaacacccacgactccgacctttgtcttggagaaccccaaacacctccgaggagccctacctggtcctggaggagaccagtaatctccggggtcatggagatgaacgagagataacaggtaccaccccacgaggcccaggactgcatctttcagaggagttctgagctgcttcctcctctgcacccccaggagtcccttcccaactttgtttgggtccctggcatccttgagaaagatacattctttcctttttccccatctttaccagacatgggaaggaggacaatgcattggtcatttcccaaagaaataaatacatccaacgtgtaaaatctgggtgggcgtctaaagctctgaatggaattgtctagttatatgagggagcagccttcacaatctccacagcaaaatccagagtcctcatttgagatccgcgtgttctcattttcttagtcttcctgccccaagcaggagccactaagctgctgttttagttatttttctattgctgtgatgagacaccatgaccaaggcaacttgtagaagagtgtattggggcctagaccttcagaaggttagagtccataactggcacagcagggagcatgacagcaggccggcttgtcgtcatgtgctcccacatttgagacacagctaagagatataagaacactgggaatgacatagacttttggaacatgaaagctcattcccagtgacagacctcctctggcaagggcaaacctcctaacccttcccaaacagttctaccaactggagaccaagtattcaacatgtgagcctatggggaccattcccactcaaacccccacacctggaggttcagggaaacggaactgatggcagtgatgggtctatggcaggtgctctacttctttatcccgacaaagacacccaacttaagtgaaaacactctaaagggtaataaagctattatttcaacatttgtatttgcagtggagtacaaactacattctttgagattattaaatttatgtcaaatgttaaatacatcgaatacaggttttcaaaaaattttaagaatatattcacagaagataaaaacaataacaactaagatggccagtaagcacacaagggcatttccacaccaatggaggctccagtcagtcaatagagcctaaggagcctcatgggagctgcccgagtctgagggatgggtgccaccaatgctcggggcagcttgtgaagacactatgcaggcttagagcaaccaggctgaattcacgaacaattaatttccatttattcatattctgtgtggaggggttttgcctgtgtgtgttaccctgtgtgtgcagtgttatctgaggccagcagagggcatctgatttccttgaactggacttacagatggttgtgcaccaccctgtggatgctaagagtcgaacctgggttctctgcaagagcagccagtgctcttcaccaccgagccatccctgatgctgacctgaagacacagccttgcctatgccaagtgcacagtgtgcctctgatctttagtcacagccgtttcatgttttgttttggttttggtttgtttttttttttttttttttttttttttgagacaggatttctctgtgtagctggatgaggagagctgtgctgggatcaggaataggctaaaagcagaaacaacaaagacttactgaaccacgttgaaaagctgacaagacagtgagagccgggaaataaggcatttgctaaataagattagtagcttaaaccatgcaaagatcggtttcaaagctatgctgggtctctgtatcttgttgccaaaactgcttcccaggaggaagacatgaaaagtctccaccccttctcctggggtcccagtgccaaactgaagcacagtctaccagagtttttactctgggaaaccaatgagtttatttggcttctctatagagcatagataagggactgcttacagcgcggtgggcgctcgcttctccttggccacatccagcatggcttcaggagaatgaagaaaagacagatacagaaacgcgcatggtccaggctctctgatgaacatattcattatatagcattgaacagaaaggcggggttattacacacaacaaggaggtgggtttatcaaggagacctgtttatttagtcttcttaggagcagcctttgggctataaacatccagaagggaaagctatggtggactttttctgtgcacactatccttttttttttttttttttttttttttttttttnnnnnnnnnnnnnnnnnnnnnnnnnntagctctgtctgtcctggaactcactctgtagaccaggctggcctcaaactcacagagatctgcctgcctctacctcccgagtgctgggattaaaggcatgcaccaccaccgcctggctctgtgcacactatcaataaccagacccgagcaggctttgtcgtccctctgaacctcatcctaggggggaagactttgccattttcccatgagtctgaggttatggagtccgggacatgactgcccatgtcaacaacacatattcactcagggagtccttcagtctccacatgtcccgaaataggtcatatacggagaggctttacccaacagggataaaggacccccgtagttgcacagttccgtggcctttacatactcctccccaaagccacgtgcaattaaggcagaattttgtactacagggattagggagctgctgatacccatgtgtgggtcttgtgactctccttaaccctcaagaagcccgaatggaataaatcttttgcacagagacacagctgaacccggagacggtagtcacgtgtctccaaggataatcgctcacaacatacaagtctactttatcacatgcttggtccttaaactcctcacactgataaagtcttagcccctaaattccttgtgctgtggcaaacctgtcaggtctcagagaaacctaggataagtctcactcagtacctatggctcctcccagcacttctcaccccgcccctacactaaacccctccttctcagggtctggacttcccttccccccagcttctggtccctgtataatgcagccattttgactgcatggtcccttggtctcctggctcgctcctggcctctttgtctgcttgctcccctctccccttttagttttctcttcctctctaccctccctctcatggcctggttcagtatggacccttcctgatgactctgggtcttcactccctcatatctgcaataaaaacagttgtgtcctcactttttttcccattcaaaacagacctctcttgctgaaaaacaaacacaagccccaagccagaagaccctgcaagtgtcttcctttgcagccattgactctccaaagaagtcatgcaaaaactggcctccgacctgaaaacttccccaggtcaaactgctctacagtcattcattgtggcctgtctcttctgatggcactgcttttcaaactcacatggctgggcttcctcagctttggtggttttatagtctagatatattctaacaatgaccatcccagaatttttttttttaattcaggacaggggtgggaggaggcaaacccatctactgatggaggagtgtgttagccaatgttctgccttggtaacaaaatgcatgatggtctacttacaaagagaggtttatttggctgggcattggtggcgcacgcctttaatcccagcacttgggaggcagaggcaggaggatctctgtgagttcgaggccagcatggtctacagagcgagttccaggacagccagggctacacagagaaaccctgtctggaaaaaaacaagagagagagagagagagagagagagagagagagagagagagaaggtcttactgtgttgtgtcactctggctggcttccaacacatgacaactccagggcctccttagccctgctctaagtgactgggtaatttatcaccttctccccaggaggctcctccctgcccctccctgcccttccctgcccctcctcattcttaccctcctgaagcagccaccatttcgacttaatcatcactgttgacctccccaccacacacatacaacttgccctctgcataaatggagtcacacaatagccactcctagagatccttttgaaggagaggaactgaagctcctgtacttagcaaatttaatgtgaattcccacccacaacgacgcccctctctgccaccaatggaaatgagaagttaagccagatcaatgacagcaaactcaagtgtaccttttcctatgcctgtgacttgtgtggcacacatcaaagctcactacagtttaagaagcctaaaatcagggctccaaatggttagaaccacggccaatgctgagaaaccattattaaagaccagggaaatgggtgattctaagcttcctcctcactcctggaagaagccatttgcctgctttacaggacccagaagccggactcagtcaacacccaccttctttctccactcttaaggggtccagggccagtggtacatgtcagtcacacagcaacaccctctaaatgcccagcttccctcacacgaaaaactcatgttttaagtatgtttacaaatgttgtgttttgcctgcatgtgtgtatgtgaactctgtatgtgtgtggtgccgggagaggccaaaaaagggtattggaacccctggaactggagtttcagacagctgtgggctgcctgtgggtgctgggaactgaatggtgttctctgcaagtaggacacaggctcttaaccgctcgcttcaggcgcccaggtgagattttagtagctgattaagtaactggtccccaggagcatgtgattaagttactgtggccaaggacccttaagtgcagacctggagatgctaaagctcctgttggggaagagcccatgagaccattgtgtccccacaaccctgccaagcccctgaagtcagcgaagaagtgatttgtggtgatatctggatggtacaaataaagcctgcccaagaacccatttacagtgattcaaccaataacttttttgtggcgctggggatggaaactgggttttttgtgtgcgtgctaggcaagaactctacccagagctacaccccaaaccttcccactgcaatcaagaaagccagatgtctcaccaccattcctggaaaacagctacccagatcttatcaaagatgttggtcggcgctctcccttctgaagccttgatgaaggaagcttcaagcggccattctgggagaacacgctggagtcagttacacaagataaatcaactctaatatagctagtcaggggtgcatacctttgatcccagcactcaggaggcagagacaggcagagctctgtgagctccaggccagcctggtctacaaagagagttccaggacagccacaggactatatagtgagactcttaaaaataagggggctggagagatggctcagcggttaagagcaccgactgttccgggttcgattcccagcactcacttggtggatcacagccatgtataactccagtttcagggatccaatgttcttttctgaccctctaagggcactaggcacatatgtggtacacggacatgcagacaaaacactcatatgcataaaataaatctcataagaagtaaaataaataaataaataaataataaatggcagggctggagagatggcccagcacttaagagcatttcctattcttgcagaggacctgtgttcaattcccagcacccacgtggtggctcacaaccatctgtaggcacacacagggtacacatatgtacacataggtaaaacactaatacacataaaataagaatttgttttaaagaaacagggtcttggccaggcgttggtggcgcaggcctttaatcccagcactcgggaggcagaggcaggtggatctctgtgagttcgagaccagcctggtctacaagagctagttccaggacagcctccaaagccaaagagaatccctgtttcaaaaaaccggaatagggtctcagtggacagaagaacggtcctcaaaatgctcacacgctaattcatgtaagcgtaagcattgaccttaacgactttcttttagatttgttatgcagtgttctgtctacatgtacccctgcaggccagaagagggcgccagatctcattacagacagttgtgagtcaccatgtggttgctgggaatagaaactgggcccttggaaaagcaggcagtgattactactgagctgtctctccagcccctgtaaaaccgactttgaaacatgcttgcctcatggttcccacaatggggaaagtgtctggatcatctgggtgtcaccacagtttctaacacatggaagacaagagagccagcatcagaacaaggtttgaagacactgaggtggaaaatgggaccaaccttcaaattcaggggtcacattcagatgccagtgaccaagcagaaacttatagacactccagaaaccagtgttcaggaaggtatacagagtcctgataaagtgagtctttaaagctccttattatgtcttcattccaaaaggcttctgtgtgccgagctctgagctgggaatttggattcacaaccacttagtcctcagagccatcctacggtgtgaagactagccagtcactaggcagtgagaagcctgccactcagaaaagtagctaacacatgagcaagctgagcaggtttgttaactctggctgggttggaagatttatttatctttctgtgttagtggcttccctgcatttatgtacatacgtgtgtgtgtgtgtgtgtgtgtgtgtgtgtgtgtgtgtgtgtgtatacctatgcaggaatcgaggaggtctaaggggccagcagagaccatgggagattgccctaatagtgacggcctcagtggccctggctatgattcttgctcctggacttgcagcctctcttgtgagtacctacagagtgggaaccctttttctaaccaggagtgcaggcaagtgaagacaaagtctcttggtgggggtatcaagaggagggactgagaattgcttacacagaaatgatgggctagaactagcaagagagagggttgggaaagcccagtaccatctagacggtgtatagttgggcagaagaaataaggagtgagctagagtcctcctgcaaccatggaactgattgagagatgctgtgtctgagtgccccagaaggtgaagatatctcaccatcctcagcagaaggaagggaactgactgacctggaggacccagccccagaagggcagcttcccctgtctcccctgcagccaagtagcctccctcctgcgtggcttcccactaaggcatcataccctagtgtttgccgtgtgttctctgttgctgtgataaaattcttactgaaagcaatttttgaggggaagggtttctttggcttacacttggcatccatcactgaggaatgtcaggacaggaactcgagacagggacctggatgtaggaaccatgaggaatactacttgctggcttccctccgctcactcactcctgcttaggcggcttttcttatacagccaggactacaagctcacacccacaccccaactatcctcagtgggctgggcccttctgcataaattaacttccaagaccaccgcccacagctgtgcccacaggctaacctgatgcaggcaattcctccagtgaggttttcttctcaggtgtgtcgagttgagaactcaggctaaccaggacacagggaaacactcttgctagaattcccccagttcttaaatgccttggggttctcaaatgccttgagtgaaactggggagcaggtgtgaacgtcatagttttgtgctgcacagccagtgagacacggtctaggtgagatagaccaggtaggggaagagggttgcattgtgtggcttactgatagggctgtcccagattctctctcagcaagcagttccaaagctgtgagacctccacagggaagacaggttaccaacacgtttctctaaccagcagaagcctgcagagagaacagctcctcgggcctgcccttcgctnnnnnnnnnnnnnnnnnnnnnnncagcagatcttgaaaagcaggcctcagacaaggccaccatgacatctatccagggtcctggggcaactggccgcttgcccacacacctgcctcatcagtttaacactatcaagtctcttctgcctctggggttctcacggcctggggcttgactagaatctttggacccaagctgtttctctaggcacagtccacagtagccctaacagaatagcagctgcactgtcaggataaaatgtgatcaggaacagaagtcaggattggtttcacagacctttaatctcagctacagaaagtgtgaggcaggaggatacaaagtttcagaccagcctaggcaatttaccaagaccctgtctcaaaacaaaaagtaaatttaatggctaggcagatggctcctgagtgaaacactcgctgtgtaaacctgaagactcacattcaaaatgcctatattagaaaaagaaagctgggcatggagtgcgtctgtactggagagagacgggtctctggggtgtgctggccagacaatctaaacaactgatgagcttcaagttcaatgagagaccctgtctcaaaaacaagtaaggaggagggtctggagagatggctcagaggttaagagcactgatagtgtaaggatgcaggcattatgctggcctgcccctgtcacctggggttgctggggattgaactcagatcctctgaaagagaagccagtgctcttaacctctgagccatgcctaactcctcacctttttaataataagtaaaggtgggaatgtaaggattcaggcattctgctggcctgccccggtcacctggcagaatgtactcaggcagtactctggtcagcccagggttccatgagtactaggtctgtatgcaggtgtaaaggacccctttaaaagacagactctgcccacttaagctctctcacttgctctcttgcccttcacctctttctctcttctccctcccctttaatcaactccacgtggttaacgaatctcttggttcatgttccatgctattgcgctataactgaaacaaaagaacaactgatagaatgcttgcctagcatgtatgtttaatctttagtcctgaagggagggagggaggacagaagaggaagggacagagaaggaagcaagggaggaaagaaaaaaggaaaaggaaattaagctggacatggtggcacacacctctagtcccagcactctggaggcagagacagatggatctccgtgagatgcaggacactcagtgctacaaagagagaatctgtctcaaaagtaagcatacacagcaaacaagaaaagcaaacaaaggacaggtaaaactgattcgtggtaactgaggtctgccacgggcctctgagagtgggaagtgttagaaaaagagctttctgggtaacggatactttgtgtcggctgggctcttagtgacacagctaaaaatttatcaaaattgggctagagtgatggctcagtggttaagaatacttgctgctcagccgggcgtggtggcacacgcctttgatcccagcactcgggaggcagaggcaggcagatctctgtgagttcgaggccagcctggtctacaagagctagttccaggacactgtgaaaccctgtctctgaaaacaacaacaaagaatacttgttgctcttgcagaggacccaggtttggctcccagcacccaaatggctgctcacaaccatctgtaacttcaactccaggggccccgatactctctcctgacctctacagacaatgcatgcacgtggcccacttacacacaggtaaagcattcatacatacacataaaataaaaatgaactcgatctaacggaacgcttaagatctgtacattacaatgcaaattttacctctatgaaaataagaacaatgtaatggttttcataagacaataccctgaagcagtgactctctccagtcattccagtccctcatcctttaagacctccatccgatttctcttgcactgaatgtatgaagtacctgcttggcacctaagaaggtccctagaagctggggagatggggcaggctgggcagggggcaaggatgacctgagggcactgggggggggtgttggagacaggtttataaacaggtgacttgtagactgtggccaactcttttcaatcgtcctgccccacagggaacttggcccaggagaggcaggactgctcacacagcccaagaattacggggcagatacaagagtacaagaagtgctgggcaggctgcagctgcaagtcagggcatggccaaaaaggggtgagaaaactcatgcaactagatagcatcacacagggaaagccctggggttagcacagggctaggaatgccacacagaggagtcaggagttcagcctgtcataacaggaagccagtcagcaaggcagagtagggtctatgggacaaaaaaatatcaaacaccaccacctttaatcccagtacgcaggaggcagaaggaggtggacgcctatgagttccaggcttgcctgtccacgtagggtgttccaggtgagcgagcacctacataataacatcctgactcagaaagaaagggagagagggagggagggagggaggtaaggagggagaaaaagaataaataaaggaaagcaaagcacagcgtgaagttcagcactccacagcacgcaaacttacaccttagtccttaaatgagaagaaggcagagaagcagcagaggtctcaactcctggtgtggcaggggaagagactgaaacagaccagactcctaacatagatgatattaaattattttagatttacttattttacatgtgtgtgtcttgccctcatgtatgtgtacactatgtgtgtgccaggtgcccaccgagagcagatggggtgttggatcccttggaatttgaagtactgacggtggtgagcctccatgccgggtactgggaattgaggctcagtcttctgcaagagcaacaagcgctctaaaccactgagccatctctccagccccctggactgtattagaaatcttaaaaagttaaaaaaaaaaaacaaacaaaaaaacaatgtggaccgttaaaaagtccacggggcgcccaccaggagctgcagctgcgctgtcgtggaccagaagacttcctctccccgggacaacagacccattctttccggttgccatcagtattcactcagggtgttgagctgcctgctgcagctgctccactgtgcgtgaagaacagcaccacagagctgcggacggcttagagagtggccaagtcccaggaacttcgtggttgataaaaacaggagataaagttgttaggttggcatggataaagattcggtctgaatatatgcttagcgtgcaaaaataaataatggagggaaacatgccacgacatcctagtaactatggaaacagtatccatggcaacaaaggcaggcccgaagaggccatcaagactgcctgcaaaccccagaggatgcgtgctcaggagccccctagtggcaataattgggtagtgagtgacccagggatcggcacctctccaaagaactgatttattcacaaggactacctcaggggaaggtggctaaaatcgaagtccccaagctccctgtcacaccccagctccccgctcgacagcgctcgaaggcctgtaggcacagcacacgtccagtggactcgttctgactgactgttcttgcacgcatcactcagaaaggaaggtaatcaattaggctaggacgtgacgctggagctgacatatctccgctcggaagttgtcaaatgtgaaaataatcgtgttttcataacccacaaaatgcgataagtgacttggtgagtcacttaaccgcggggcctcccgtcctcactcatagcagtcacaccctttggagcttgatcgttctgcatacctaactaactaactaactaactctgtgaagagcgagcgagcgctgactgcagcagggagggttcaagagagcttttgtcatgcaggtgccggttctctccttccaccccggggatcctggggcttgaactcttgaactcgggtcttcatgcttggcagcaagtgccgttgcccactgagccatctctccagcctattgcatgatttcttatattgctttgttttctgtttttgtttgttttgacagggttgagtttatctcaggctggccttgaggtctacatattgccaaggataactttgaactcccgatgctcttgcctctgccttccaagtgctgggattgcaggtatgcagtagtacgcctgtttaactgcagggcttctgatgacctttgccacactcacagtggttccctgacaagctatgacagagtgaaaacagaccagataaggtatcagagcaccagggagctcgtgtagctgggcttctttgccctgttagtcattctcagttccagtttggctatcagttcatcaatggatatggtcatgtcttgcttgctccacctagctcctggttgagggagacaaggctattttgttgttgtcattgttggttttgtttttgagtcagggtttctctgtgtagctttgtagacaaggctggccttgaactcacagagatccacctgcctctgcctccgagtgctgggattaaaggtgtgcatcactgccaccgggtctaaggctatttttttctcccaataagatccttcaaataaaatacagtggcagtcaaaaagcaaaggaggcactggagagatggctcagaggttaagagcactggctgctcttccagaggacccgggttcaattcccagcacccacatggcagctcaccactgtctgtaactccaagatctggcaggctcaccagacattcatgcaggcaaaacaccaatgcacataaaataaaaataaatataaaaagtaaaacagggtagtaaagtagccaggcatgctgacaaatgtccttaatcccggggctggagagatggctcagctgactgatgttccagaggacctgggttcaattcccagcagccccatggcggctcacaattatctgtaactccagttacaggggatctgacatcctcacacagacacgacaatgcacagaaaagataaaaacaaacaaatcatttcttttaagtcaagacactgagtatgctggtgaaaatgtgtacctcagcacttgggaagtggaggcaggaggattgccttgagtttgaggctagcctgagctacacagtataatcctgtctcaaaaaaaaaaaaaaaaggcaaatgagctagaaggggcagggcaaaaatgaagactacaaatactaaacggactccctggcttctgttcagatagatgagtctagtctgtctcctttgaccaaatggggagaaaactgcgcagttaaaacagggtggagtgggcagtgtccttagcagataagattgtccatgggaaatcctacaagcagtgacttccacagccaggtctcggcagggatgggcacagcaagtacctctagggtgcctggacatagttgacgagctatgagaagcccacaccctgcctgaagccacgtggccctgggactcctgcattccaccctggtgactggtttgctctctgagcctgccaaggagatcctggtaaccatactgaaaattatttaagattaagtaaaatcctgtttccagcccccacccccacccccaccctctcggctcttcccaggctgtactgagaacatggcaaccagacctggcccaagaagactaatgcagaaataaataccctctgcagagagtggccaggccaagtgacactgcagggtcttcagtgaggggctcctacgaggactaggctgctgtttgcttcaaacacactccttcagaaggctcctctgaggagacaagtaggcccagggtttaggtttcctcgaattttttcaccctcctcagcacaggcaaaggtctccagctgtgtggcctccgttgactccattggcagcagctggtgactaactgcaggtgcagggctctcctgtaacagcttcgtcacacctgctcagcctccaggccagtttccctcagtccgtgttccagccccgccatagccttccttcacggttacgttatttattgagtaacccatcctctgccttggttgccccagcctttctcggctgtgccaccccgttgtcctttttggttttcttagatcttaagatgtggttagcattttcttacataaaattttgtctgtggaaattatgtatgcccatattctcagaatttggaaggctgaatcaggaggatccctggaagtttgaggttaacctggtccacgtagtaagttccaggccagcttgtgctgcaaagtgagatcttgcctcaaaaataaataaaatccttagttatgaaggattttctcctccacctcaaatggagactgaatatgaactgcttcttctgcaggaacggttccacccattgcaacgcaaggaagcccctgggaaccacacctagacctcaggtgaagatgccagccgccaggcaggcagggtagcacacacttgtagtcccagcaccgaggaggtagaggcaggaccatcaggagttccaggtcatcttcagctccacagagagctggaggcctgcctgggtacctgagaatgtctcaagaacccccaaatctggggctggggagatgtctcagctggtaaaggggtttgctcacctccaagcctggtgacctgggttccatctgtaggacacatgtgattcctacacggtgtgtccttggacaacacacacacacacacacacacacacacacacacacacacagcactttcggaggacccacgaggtggctcacaacagtcggtaaccacagctccaaagacctgccaacctcttctgccctccacggacagcaggcacacaagtgattttcctacatacaatcacacaaaacacataaaacaaacaactaaaaacaaacaaaccaaccccaaatccaaaaatagtcaaacagacaaacacaaatgtccgccaaggatccaacaatacaatctgaggacaggagccaaccatgatgtaaggtgagcccagaagccttccttcccggggctgagcgagaggacccacgggaaggcgaatttggaaggcggcgccactcacttctgcaccagatggcatggcaagcggcatgaggccctggctggcatcgcttcaatgctggggccacggtctgggggatggggaggcagagtgctggaggtgagaggggcagcaggaagccactcactgcatgcaaggcccgaggcactcagagtccctgtctgggccagcgcgtcgagagaacgcgtgcccttagcatgcagctgggaccgagacccctgagtgtgtcggcgctgaccaccaacggctccagccccagcagccaccagaaagccagcgttctttcctccgacagcgtccctccagtgccctctgctgacaaagctcgatattgcgctggctgcggaggacacagttgttggaagactactgggagctgagaacctgcaatcggataggcatgagagccacgtgatgagagttgttgataatgatgaaaagcaagatttgggggctggagagatggctcagcggttaagagcactgactgttcttccagaggtcctgagttcaattcccagcaaccacatagtggctcacaaccaccttgaatgagatctggtgccctctgctggcacgcaggcagaagacataataaataaataaaatctttaaaaaaaagaaagaaagaaaagcaaggtttggaaacccagaattaagaaaacttggtgggaggctggagagacggctcagcaggctgttcttccacagccgtagaaggatttggtgtgttttacttggttttctgaaactaccactccaaattacaaaatcacatagtttattcaatcgtatgtaaaaccagggtctttctctgaaaagcacaggcagtgggtggaaattgtataatttcttaatgcctctttcaatgccgggattaaaattatggggccaggcagtggtggcgcacacctttaatcccagcactcgggaggcagaggcaggcggatcactgagtttgaggccagcctgatctacaaagtgagttctagtatagccagggctacacagagaaaccctgcctcaaaacacaaaacaaaaattatgtattcatgtagatcagtcctaattcaaatatgaagttttggtttgtgtttgttttttttttcaagacagggtttccctgtagctttggagcctgtcctggcactctctgcagaccaggctggcctcacagagatcctcctgcctctgcctcctcagtgctgggatcaaaggtgtgcaccaccaccacccagctgaagtttgcttcctaataataaaatagattgcccaccatcttttcaattcatgtaaaatatattgttatattgcctcaaaaataattaatcaagtacaataagaataaagttattttcaaaatgactcaaaatcctctcgtttgcctctctcctcagaagtcactactgtgtgtccatcaaaatgagggatacatcaagagacagagacatggaaccctccggcgggcggtgaacagaagcctcccggggccagcaggcccagatggaatcagagtttgggccaaaactggagaagaagaaaaaaatacttgcatggtttcggaagcacgagattgattgactgaaaaaaggatgaaatagagccaggtgtggttgctcatgcctataaaccagcacctgagagactgaggcagaaggatcgctctcagcgtgaggccagcctagactacaaacaaacaaacaaacaatgcagaggggtctggggcctggctggtggtagcgacggcctagcgcatggtgtggtttctgcgtgagacttgtagaattcttttaggaattgattacattaaggcactaaagaattgtactaaattaaaaaaagaaatccaggctggaaagatggctcagtggtaaggacacttgctgctcttgcagaggatccaagtttagttgattctcagcatccacatccagcaactcaaaaaaaccatcgggaacaactccggctcccggggatctggtgccctcttgtggccacaacagcacctgcatgtttgtgcacagacatccacaaaattaaaattaaatcttttaaaaataagtcaataaaaatatttttcaaaaactccaccactcatgaagaccgtctcttccctttggcgatggtgtctggacatcctgcattctcggagccatgagcctctcagcttcctgtccagtgctgtagtgtgtctccactcgcacgtccctcctgtccagagccgagcgcggtgcagtccacacactcggaccatggtgtggttttcagagccctgtcttctccacggttttgtttggtcatctcctgatttccaccccccttccagaaacccaagactcgatgagccttctgctaatggagctgctgtgctctgtgccttgggactcggtgcattgtgtgacccctgagtcttggccagagtccaacagaaagacagctgctcttgagatttgggactctctaatggcttgggcgtgagtttccggagctctgcgcacacagacaacacctctcggtatttttttaaaattacttgtgaagtcaacattgctttttttttaagattttttttttttaatttttggttttccaagacgggtttctctgtagctttggagcatgtcctggcactcgctctgtagaccaggctggactcgaactcacagtgatcctcctgcctctgcctcccgagtgctgggattaaaggcgtgcgccaccaccgcgcggctaagtgttctatactctgccagcaggaggtcggtcttcgaagatgagaaagcacagatgggctcctaaatccagaagccctctatcagccgcctgccatccatccatgccctgctgagatctgaggaaacgggagtgatggacaccccagctgaggctgttccagaaggcaggtgccttgagagttagtgaatgcctcctgtcgggagcggtgtgcccctccgctgagaggaattccagaaagagatctgtgcctgtcaatagcagcggttaagagcactgactgttcttccagaggtcctgagttcaatgggggcgtcctagactcaggacatggtggcatgatagccgtttggtacatttaggaaaggtggactgtattgcatttaatggtttatatgactggagtcttcatttctcctgttacccggagtccatacctaccatagggtgggcccatcgatgtctcttgtaaaaacctgcgatccaggctgctctcagctccccactccgcccttccacagcgcacactcttaccctcgttactcagctgctggtgtggcccagaggtggatcacttgcctggtgtgggcacaaggctccgtcccaagcatgaagatgggggcgcaggtggagaggatggccattatccggagacagttcagacattaccgtcacgtgttgatcaggagactagacaaggagagaagcaggagtatgacccctgttagagcccgagggatccacagaacaaataccgactgaaatacgggtctctttctagatctttcctaagacacagtggtcctactgagcacaggcattactggtccattctatcccctgccccttttttctttttaagacaggttctctctacatagccctggttgtctctgtagaccaggctggcctggaactcacagagatccacctgcctcggcctcccgagtgctgggattcaaggtgtgcgccaccacactcagccaaccctatagccctttaagagtgataagataaaccgggcagtggtggtacacacacacacacacacacacacacacacacacacacacacactgtgtgtgtgcgacctcagtggaagagactatggagaatggagatgagccggggctttggcggggatgggaggaggtgatgcggtctcacgcgttggaaggagcgacagcgccacctcgtggtaacagcggcactttgccttctccagggcctaaccgtgggggtcacgaacattttcaacaatagaaagtttctgggtgcacaaaaataaataccaaaccgaagacctaacgggtgtgggtgttggtagcctgtgcagcgcgctggcactccaccgcagccttggtctggaaccaaggcctgcacaccaggccctcgcggcacaagccgtgggaagcaccgacagacgctgcctaaaaggccgaggctcggatcccagacagtgttttactctgtagcccatttctgcaagnnnnnnnnnnnnnnnnnnnnnnnnnnnnnnnnnnnnnnnnnnnnnnnnnnnnnnnnnnnnnnnnnnnnnnnnnnnnnnnnnnnnnnnnnnnnnnnnnnnnnnnnnnnnnnnnnnnnnnnnnnncagaagggttttgtttttttggggggaaggaggggaatgggggggggggggcggttaggcttcactgggactgagttacaggaaagtagctgtgtccatgagacacctgtaagacaccacggactcatgagggagagaacgggaaaagggggagaccaactgctattaactttgaaactctgggctcacactcctgggctctggatacccaggatgtcagcgcacggtgccagcgtctacgggcagagcctgccttctactggcggttcccgggatgacaggtactttttttaaagtgtaggtcaccacaccctctcactgaggggaaaattaatgatgatagtcttggcaatgaccggaatggcagctgcctaagtgagtcccacgactcatcatttaatccttgctaagaggagggtgataggacctaccctgttctacaaattagacgtggaggcagcttgtcccacctgctaccagccaatggctgggcacgcatccatgccaaggcctgccgactcagggtcctgccttggggcccttagcgccggccctttcccttttttttccctggaacttcactcatcacacatggccttgtcttctaaagccaaagggccacaccgtgtgtgcaagcctccactgctcagcagctgcatagccccaagactctccacctccacaccaagaaaagaaactgaattgaactcaggactgctgctaggtttccagtgcctgcccacttagctaccaaggtaaaatattcttgcccatagtccacggtgtaaactacctaggaaaagcagactgccaatcagactcccaaatgatgaccatgaagtcaaggtcggagagggggatatttgggggaacatctcaaccaggcctgcacaggatcatttacacgagccttgttttaacatctaaagccagtgtgacacggtgctgagcatctaatttcctaatgttgggtggcttcatcccaacagccctgttctgtgggagctctgactagccccatttcacagataaggaaactgacgtggagagagcttatgcctgtcccattagttacattagccagagctgtaattattcaatgtcatgagaaaggcagcatgagcatggggaggtggccaggggtcaggacactcacccgtgagtcacgggcggatgcatgggcttgtctgtttggtcgttctggtcccattgtaaagcactcggcatggtccttgaaaaagaacaaagttagatgttgaaaagctctgggacgcttcccccaccagactaaccatctgtgaacggactcttaaacacatcagctgtcagtaaccagagaggatgccaggttcccttgacctttccggtcctcctcaccctcagggctctgaatagaatgtggtgggggcaggaccaacctgtggtctagacgcctctatttacctgctcttcccatggtcactccggcctgtccagtagctgatgacccctgctctcacttagtgttactctcaaaattttaacaaagctgctttaagttaatgtttgcatgcatatgcagatgtgtgtgaacatgagggccagaagcaacctcagacatggttccttccactatccatccacctggtattctctcattgggatctggagcagggtggccagccagtgagccccgggggcccattgtcaccagcaaattgtaaccattttctatcacacccaactttttaaaaaacattatttatgtatatgaatgtattcatgtgggggctggagaggtggctcaaaggttaagagcacagactgcttttcccaaggtcctgagttcaattcccagaaatcccatggtggctcacaaccatctgtaatgagacctggtgccctcttctggcctgcagggatacatgcaggcaggacactgtatacatcataaataaataaatatatcttttaaaaaaaaaaatatgaacatgccgggcattggtagggcacgcctttaatcccagcacttgggaggcagaggcaggcggatctctgtgagttcgaggccagcctagtctccagagggagtgccaggataggctccaaagctacacagagaaaatctgtctcaaaaaacaaaaaacaaacaaaaaaacgaaacaaaacaaaaaagaccaacaagtgctcttctatgctgagcagtgtctccagccccaacacccggtttctaacacatatgctggagattgagctcacacctgtgtagcaagcagcttcccaaaaagccatcttcccagtgctaatactctttaaagcacagaggacaattcgttttccttagtttcccctctgatccttttttccctccttctgtccccagttccttactcccctaaggttcctcaaactttgtgaactagaaacctctggagccagcatctagtgggtggatggaccatttactagacagaggaaggggtgggcggatgacaggatcagggtgaggagtgatcctagctttaagggcggttcatagggtaggtcagccggtccgtcagtgggcggtaactggagcatttataaaccgattctgattcaccaaacatctgaatgcccttcctgacagccatgcctgccctaggtgaggataaggagcaaaatcagcctggtccagagggtcaggtggctgcccaggactgacactttgtgtgagctccaaatctgcagccagctggcctttaagcagggaatggctagcttagaggaccagaggtgacaattaagagactgactaagctccaggctggagtcacaaggagccctgtgtgaaaaacaagggtataaacaggaaactaatttaataattatgcaaaggggacctccctcatgcatgcgccaggccaggccagnnnnnnnnnnnnnnnnnnnnnnnnnnnnnnnnnnnnnnnnnnnnnnnnnnnnnnnnnnnnnntggggcctgccaagccccaggcacctcagttgtcctgagtacacacagggcatttccctactgaagctaagagcacctcgatctacaatctacctcatggatcacccacacctattccctcccagccccttcagcattccaagaaatcgtttgaaatggtaaatgtgggatcagaagagagctcagcagttgagaatgggtaatgcaggaggtcccagggggtcccagggggtcccagggggtcccaggtcagctgcagcacctgcattgggggactcacaactgcctataaccccagctctcccagatcctatgtcctcttctggccgccacaggcacctgcatgcctgtggtgtgcagacagacacacatgaatacacaaaatatttttaaaaaaattttttgagacaagatctcactgtgtaatctggaactcacagaaatccacctgcctctgtctcttgagttctgggattaagtaaaggtatggaccatcatgcctggcaaaatttctaaagaatatatatattctatatattggatgcatataatacatactactatatatacatatatatgcacacacacacacacacacacacacacacacacacacagagagagagagagagagagagaaagagagagagagagatagagagagagaggagggttacacagctagtggatggacagtctgggctccttaagtcagcaaattaggtaatttgataccatttgtctaatttaaaggttgtcaaagctggagagctggctcagaggttaagagcactggctgctctttcagaggacttgagttcaatccccagcaacacatggtggctcgcaaccatctacaatgagatctggtgcccccttctggcgtacaggcatacatgcaggcagagcgttgtatgcataataaacataccttaaaggttgtcaacaacagatgaattagctctttttatttccaatgctgaagaccaaactcaacactccatgcgtgccggacaagtgctctatcgccgacctatctccttacttccagggagaaaaacatcttaccgccaactcttacttcaaacgcgtccctcggaaacaacgccttcagcgcgagctccaactctcatttggaagccagcacctcgtctacggtttcaaatcatagtctccacttaaagagatgagcgtctcacggggccgcagagacagctcacttaagagcattaccgcccttgcagaggacaggggtttggttcccaagacccacaggtggctcacaaccatcagtaactccagttctaggggatctgtcgcctatactaacggacgataaagttttgtgtgattttacttacgtgaaatgcttcggagaaacccattcacaagaacagaaagtaggcagcctagagctgggcaagggctgccctcagagggcctgggcagggcccaaatctgtcttgtacccctttagtctgcacattggaggcctgggaagccttcatcttctcagcgttctccggagtgtggcgccacactgaaggtgataatagctccctccaccctctatgtactgtgaactgagtatgttacaaggctaccacaattctctaacagcgttaggtctgtgatttcccacttacagatagccagtcccagagcccagtcaccagacactttcagcgctgagatccagaaggcaactggcacagaggagacgagactcactagcccagacagttagtagtctttcctccagccaggctgttttcaacctcatgtctctcatgtcggtggagggccagcagtctgtttttggtattacctgtctgtagaccagcacctcatgtgtcctgttcctcagaggggaggggaccctttggctgtttctgctgctcccttttcttgcaagaagcttgtgaaaacaccaggaatgtgtggtcacgtctttctcaccggaacgtttgtcaggtgcaatctgttgtcttggtcctgaaggcctgtgtggttcaggattggggatggtaggtggataacaggagcttcaggtcccattgaaagaatccaactcgcccggcattggtggtgcacacctttaatcccagcactcaggaggcagaggcaggaggatctctgtgagtccaaagccagcctggtctccagagcgagtgccaggacagcctccaaagcaatacagagaaaccctgtcttgaaaaacaaaaaacaaaaaacaaaagaacaaaaaaaaaagaaaagaaaagaaagaaaaaaagaatccaactcagggagttgggatgtagtcacatattggcaggtaggctaggctgtggggaattttcttgattaatgacaatgactgaagtgggaaggcccagccccttgtggctggtgccagccctaaccaggcggtcctgggttgtttaagaaatcaaactgagcaagccagggagagcaagcaggtgagcagtactcctccatggtctctgcttcagtccctgccctgacttccctccgtgattgtcttagtttgggtttttctattgctgagatgaaactataaccaagttggggagaaaagcacttattagacttacacttcatcattgctgttcatcactgaaggaagtcaggacaggaactcaagcagggctggaacccagaggcaggagctggtgcagaggtcatggagggggctgcttactggcttgttctccattgcttgctcaacccacagggatggccccacccaccatgcctgggccatcccccattaatcactaaatgggaaaatgtgttacagctggatctcatggaggcatttcctcagctgaggctccttcctctctgatgactctggcttgtgtcaagttgacacacaaaaccagccagtacagtgacgggtggtgctgtggaagtataggtcaaataaactgactataacttcactccggggcatcccacatcttcttctggcctcactgggtaccacatacttgtggtgcacatatattcatgaaagtaaaacactcatacacataaaataaaaaagttgggggctggagagatggctcagcggttaagagcactggctgctcttccagaggacctgagttcaattcccagcatccacatggcagctcaccactgtgtgtaactccagttccaggagatctgacaccttcacatcaatgctcataaaataaatttaaataaactagttttaaaaattaaagaccactctgacacgattgactacagctactcagaaccctctaccagattctgagagtcaccatcagatacttgccaaggccagcttcaccccccttctcttgggtgttgcctgtccagtgtgcaatccctcagcccacccggtttgggcctcagtatctcccctgtacaagcagcttcttcctgaggggaatttctgggaagattagccggaagggtgtgtgtataaacaccttgttcatgatctggcacacataataaaagttagttggtatttctgctaattgcctttgaatcggaacactccctggatggacgaggttgaagtcactgcctctgtcatccatgacttgtgtgtgtgagttgcttcatctctctgactctgtgggtaaaaaagaatcgtaaaacacttctgtcacgggtaataaggagggtgagatgatgaggtgtgcagagcgtagcaagagccgagaacagtctcatgaggctccgggagggacacggcagcagttcggaccaggctctgtggagacttagtaggcagctacacatctgagataaccgacttacagagaaaaagcttttcttgaactcacggttttgaaggatgcccctgttgtcttggggcctgttaccccaaggcagcacacaggggggagcatgcattgaaccaaaccaatcacatcatggaaaaccagggagcaaagagaaaaggggggcagagtcctgtggtcttatttcacggcccctctccccaatgacctggtgtcctccctgctaagtcctacctcttagagcttatgctacctcctaagggcggaggccgagtctgtaaccggtggtgagaccacaccatttcagggttgcctgtgggtgggtgagagtggggaggtacctatatgaatagatgggccaacagacagacagacagaggacatgctgaccattcggtgtttgttgagtgcctgccctggtccagacactgttctagaggtgcaacagtgtccttgtctcactggtacaaaattacaaagggtctgtgacacagacacataaaaaagcatagggctgggtggtggtggcacacacctttagtcccagcactcgggaggcagaggcaggcagatctctgtgagtttgagaccagcctggtctagaagagattgttccaggacaggctccaactacacagagaaactctgtttcgaaacacaaacaaactaacaaacaaaaagagcatataggagtgcctgtagcaaggtggacaactagaatgagaaatgaacttgcgaacctgaaatgaccttgagcccgttgaaaagaaaaagctaaaaacagtcccctagtcttaccctaggactgagaaaagtagagtccatggagggaagagatgaattcatgcgacagggaaaggtgtggctggttaggggaaagatgggatcacgaggaagtgttttcacaaggattctcaccacagacaccaggacagcatgtcccacttgagcagatggctcccatcccttaggctctacctgcttctctcctacaaggtgcccagccttctggatctggggtgatgccaggctgtatcgagggtacacacacctggaccaccgagggcaaagtacacagtggagaaaacgcagtcaagtctttccccactgacttgtgtcttcacctttgtgagatccacccttactgccctcactctcctcctggaccggatgctgagctcccgggaaaaccaaagggtggagggagagacaacagctcaaccaaagaaaggggctgtgtgagcccacgagaacaaagcaacggatgctgccacagtggttgttggctcggaggcctggcttctgttttctctcttcctttatctatcggggctgctatttgttcagcagatgttcaaagtctgtgtctctctgcacacaaagcgctaagtgatgcgtgtgagggagatcaatgtcccctccacttccaagaagcttgacggtctgggaataaaagataagcgtaggctgtatgaccttccctggccctgtgttctgtgaaaggttttttgtccctcctggcctggtgccagcttggtggacttccttccctccctcctgtcacaggtgaactctcaactcctcccaggaccattctggaactaactccctggacctaggtgaaagcacagagcgggcccaccctcaaacacctgggttttgatctctctcccccaaaaatggggacaacaagatgggctctacaggggaccctagagagacagggatggctagagaatgagggcggcccaggcacaccgccattactcccagaaacaaagacacggagagacatggagttcaagaactgcttgtgtttatttgcgaccagcttaggtcaacagaggaagcatcaaaatggggcgagaaggggaaaccgtgtgacccagcctgacgaggcttctggggaactcactggaaactggggtttgggatgttcccagaagaaccaggaggtcggactcttgggggaagccgaatgggacgattggggcgattggggcgaggaggtcggactcttgggggaagccgggggcgaggaggtcggactctcgggggaagccgattgggaccaggaggtcggactcctgggggaagccgattccacccattacttccccagcttcctgcaggattccacccatttcctccccagcttcctgcaggattccacccatttcctccccagcttcccgcaggattccaaccaatacccccccagcttcctggaggataccgagcattgcccaccaagccggtacctgataactgactattgctaccccatattccagaagggtatggcatgggccgtcttccccacgcagttcccgcccctccacctccccaaggacttaggatcccccagggaaaaccaggcagcaacctgcggaagagaaaccagaatgggtgctgggcaaagtcttctgcctcggttctcagtgcactggaatcaggctctgagtcctcggaagcctcggttgcagagaaagccacaggtccaggactgcccctggaaaggtatggcagggtttctggcagcacttgctccaggcggtcttcggcagcagcctccatccctggctgagggtcctcgtagaaccaggactccgtgggcgacccctcccagaaggaaggctggctgagctcctctgagtcctcctcgggtagggcgccatctggtggggattcggcgagccttggaagagcccttggtagttcattattagcagggtctggcttgggctgaggctgtcccaagtcagccgtcccaagcttgaggctgtcgaaggaaggttttcccgcctgtggggagattttctcctctggtgccccaatgctccgtgcaaagaggcctgattgggaaaaaacaaaaaagaagataaagaatcagtgagtcagatttggtaccagctactccgttgactccctggcccgcttccctgaaaacccctttctgtactggtttctcacttccctggggactcaggagcacaccctcctacgtttcccctttcccttaatcccggttcccaataaccccagtgctgtccatacctggcagagacagacagaccaggagcaggcccaggggagcccggctcccacccgcgaggccctgcatcttgctcagctcccgcatctccccgggctccaagacagcaggctttatcccgttggtggggtgggggacagcagaaacaggctgggccagtggttgtggagacaatagatctgcccagtccaccctcattcttgattcggtctgtggcaacaggtgtcacttgaatgtcccagaggagctgggtgtttcctcacctggctcctttccttgtcctccctgccccttcctcacccaggtgttctggtccacaggtcacctctagttgccagccctgccctggtttgtctctgcaccaagcctcaggatgccggtgccttcgaagtctctcagcattggcaacactcagcggtctgactcctttgataatctagatcattcactcgagcatcccttgctcatagatccccacatctttccctgaatgctgaagtcctggggtgcaaaagctcccccatctgaggtgctgctagatgaagcccttagtctgaagaaacgggtcactcccctgcccccctcccgccttataacatgatatattaatgctcccttgctcctgtaacagcccaccagctaacgattcccaacacatattatattatattgggggtttattttctctttgtgttgttttgtttcatttgcttgttcgtttcctattttgtctgatttctttgggggtggagttgggatgggtgtagctggacagagagtctcactatgagactgttctcaaacttaccgtccccctgccgcggcctctgcccaagtgctgggatgacagacctgtgctgtcaaagctcccctgtaatcaagcttgtaaaagattttaaaaccgttctttagattgcatttattttgttattttataggtatgagtgcatgcattcgtgtgtaccacacatgtgcctggtatctttgaaggtcagaagggggcttctgatcccctgggactaaagttatagacattagtgaaccatcatgtgggttctgagagttgaatctagatcctctggaagagcaactaattctctagcccttattttattccttttggtttttgtttgtttgtttttattttttgtcttttatttcctgagacaggtttttctctgtgtagaccaggctgtcctcgaactcataaagatccacctgcctctgcctcctgagtactggaattaaaggcaagcgacaccaccacccagcttcttattttattcttaattatgtacatgcatgtgtgcacctgtgtggagagctgtgcctgtgagtgtaatgcccagagaggccaggagagggtgtcagactcctagagcctgaggtcagggctgggaacccaaatctggtcctctcaagagcagccagtgctcttaaccactgagccatctctccagccctgatatcattttttagaacaaaagtctgaaacaggtctttctgagttaaaatcaagggacctgagggactgactcctgttagttgctctagagagactccacttctggctttttccagtttccagggccacctgtgtttcccccaccttccaagtctcttcccacactgtatcatctggcttcctcctctgcctcccatgcccacgttttaaacactgtgtttacactggacccacccagataatcctggataatccctttatggtaaggtcaaatgactaataacctgtttccctttgccgagtaacctaacatatttataaattccaaggattaggatggtgacacctttggtggtgttggggtggaggcaccattctgcctagtgcaggtggtcagacgtatccaaagactataagaaacgggggctggaaagatgacttggaggttaagagcactggctgctcttccagaggtcctgtgctcaattcccagcaaccacatggtggctcacagccatctgtgtaatgagttctggtgtgatcttgtgccctcttgtggcctgcaggcatatatgcagacagaacactgcatacaaaataaagtctacaaagctaaaaaaagaaaagaaaagaaaagaaacagggcggtggggggggggctggagagatggctcagaggttaagagcactgactgctcttccagaggtcttgagttcaattcccagcaaccacatggtggctcacaaccattcgttatgagatctggtgccctcttctgatgtgcagatatgcattgaagcagaatgttgtatacataattaataaataaataaaatctttaaaaaaaagaaaaagaaaaaaaacaggctgggaagatggctcagcagttaagggtaattgttgcttttgcagatgactaggttttggtttccatcgcgcctatgtcagttaacaacctccttaactccagttccatgagatctgatgccctcttctggtgtctatggtcatcaggcatgcacatggtgcatatgcacacacacaggaaaaccactcatacaatccattataaatctagaaaagggggagggatataagaaacactcattgtcagtggtgtaccctagcactcacagagaaggacatctaaatgctgcagtcaaatgtcagctgactactaggcgatgaccattatctgccaagctggtccctgataattgactactgctgccccatattccagaagggtatggcatgggcctcattgcactggggtgatgggagctcatgagtgattcgactagttttaaatgtagatgctatggtttgcatgtgtttttttgtttgtttgtttgtttgtttgtttgtttgtttcgagacagggtttctctgtgtagctttggagcctatcctggcactcgctctggagaccaggctggcctcaaactcacagagatccgcctgcctatgcctcccaagtgctgggattaaaggcccggctcgtttgaatgttttgagggtgcccctcaccagtctgcagtgtggggagattgagacatgagacctttaagaggtggggtctggtgggagacaagagggagatgctcttggaggagtgagccttgttgtctctgatggcctgagggctatagtttcaactctgtggaggttcacaaattcaagtccaacgtgggctacagagtgaggtcaagaccaccttgggcagcttagtgaccctggctcaaaagaaaaaggttaaaaggggagagatgggggctggggtgatggccctagccttaggacatcttcctgttcttgaagaggaccagagtttggttccaagcacccacatggagaggcccacaaccacctgtaacttcggctcttggagatccaaccccctcttccagtcccctcaggtgcctggacttataatgtgctcacatacacacacacacacacacacacacacacacacacacagagagagagagagagagagagagagagagagagagagagacctatacatacagttaaaaaaaaatcttgcctggcactggtggcgcacacctttaaccccagcattcaggaggcagatgcaagtggatctctgtgagttcgaggccatcctggtctatacagcaagtttcaggacagccagggctacatagagaccctgtctggaaaaaaaaagacacaaacaaaaaaaaaaaaaaaaaaaaaaacataaaatgggggctggagagatggctagaggttaagaacattgggtactcctccagtggtcctgagttcaattcccagcaacgacatggtagctcacaaccatctgtaatgagatatggtgccctcttctggacatcagagatacatgcaggcagaacactgcattcataataaataaaaattaaaagaaaaaaagaaaagaagcagggacctatgcactaaattgacttctagcgttacccatttccaggtctcaggtgttttattatagcaacagaaagtgaactaaatatattggagggactgggggtgtggctcagtcactagagtgcctggctgccatgcatggtgcccattcctgcaccacataaaactgtacacgggggttcgcacctgtaatctcaacataggaggtagaggcaggagattaggagttcaaggtcatctgtggtgtcctaattagggtttctattgctgtgatgaaacactgttcgtgaccaaagcaatttggggaagacagggtttatttggcttacacttccacagcactgttcgtcattgaacagagtcacgacaggaacacatagggcaggaaccaggaggcaggagctgatgcagaggccatggagggtggtgtttactgtcttgctccacatggtttgctcagcctgccttcttattgaacgcaggaccaccagcccagggatgggactacccacaatgccctgggccctcctcagtaaatcaccaattaagaaaatgccttacaggtttgcctccgatctgatgttatggaggcattttctcaattaggctctctcctctctgatgactctaacttgtgtcaaactgacataaaactaaccagggcactcgatttcatagggggttcaaggacaggctgagctacgtcaaatcttgtctcaaaaataaaaataatatatacgtatattaggagcttttataataaaaagggttttattgttttgaaatactagaatactagaaattgaacccaagtcctcacagttgcccagcgagcactctgacactaaactactctgagaaataagttctgacttaagttcacttgagctcactctgtatcccgggcaggcctgcttcaggcttccaaatagctggggttgcaggcctatgccaccaggcacagttgataaaaagcatttaatttcctttttaatctttaaaacttttattatattcatgtatggtgtgtgtatggacatgtgtgtgctgcagctgtcctggcactcactcttttagactaggctggtctcgaactcacagagatctgcctgcctctgcctccccgagtgctgggattaaaggcttgcacacccgacaaacttttttttaagttcagttgtttgttttacttttatgtgcattggtgtaagagagtttaatcttggaatgacatacagttgttagttgccatgtgggtactgggatttgaaccctggtcctctggaagagcagtcagtgcccttaaccattgagccatctctccatgactcctctgtaatgaagaatcaggactgcctgcgattctgctttgtcccggcagatactgaaggctggcttagctcctccccagggcgtctatcatcgccggttcattgagaaccctgtggttctgcacttgaagttcagcctgcgtggactcaacacccgctttctccttcctgaaagaaggggagtgggtccggcactagggcagcaacaggttgcctcttaaaatctttgagagccttgtgcatggaaagagggacacccacgctcatctgtccttcctgggctagcctctgccacagctctctcaccacagcagactcggggtgaggaggtggacagcaccctgttggctctgacagtcacagaaccgtgttaagtaggccagtgagtcagtcaccaggctatgaagttgtcttactctccccgcccccagctcccagaacgcccaggctcctgctcagtctccaggaatctgcctgggctggtccagcgtcccagaaactcaagatcgactttagggactcccacggaggacggtgtttagaaggtgaggcacactaatggaggagaagccagggtgggagaaaagaaaacaatgaggctttttggatggaagggaggtcgggagtggggggctccggtgtgagtgggaacggatttcttggagctgagaagcgagactgtagagcggaagaatccggacaccgggcaactctgccatcagttcaatggatatttattgttttccttcttcgtggaaagaggtgtaagatggaaaacactgggtcaaattagaaaggggggggggggggggcatgggccctctagaggtacaggaggtgtactacccaggtattaaagaggagacctgggactccaaaaaaggcaaaaagtctgcacaaagttcaccaagtttattgagccctgtccaggatcccgagggagccaggagtctgtgccaggctctaccgatgccctggggtccacacgcacagggcaacccctgtggtaaccaaacatgggctgaggtggagagcaggggtggcaccggtgtgttggaaacgggtctggtaggctgtggtgagtcgtgatgggtggtagcgaggtcggtgagcgtggtggtggaccggattccgccttatttggcaaatgcgcagaggcacggttgacacgtcccggcatcaagaacctgaataagtgagttgtaaggtgggtgatcacgcagagagggcaccacagcagaacggggcggaagcaccattgcagatgctgaacaaaagtgacaagagcctcccggacggagggcaggaaacccccgaacgtcttccataggcgtgggtgactttaaggcttgtcaagtggctgtcccggcggcagaaagacttgagggtctgctaactgggggcccagaggcttcacttgagccagaatgtcccggatggaacggcagggcatcctcccggggctgttgaggccacagggcttagcaatcacggtggtgacacgctgcggagagccgttcagacctccgttcagcgcggaggaggaagcggaaaggcaggggtagccggcggagatagacttgctgccgcagggctggaggacaattttgccagtggagagggaggagcttccgccaccgatggagatggagccggggcctggtggcgagcagggcccctggttagccccgccgcagggctggaaggaggtactgctggaagtgatctgaattctcgagccagagcaaggccccctagaaccgacgccacagggctggactccgccgttacccacgggctggaacacgacgcctgaggatgggtaggcgttggaactggaggagctgtagctggggataatgggattgctggagaagtacttgccctcagagaccgggggcccggctgcaaaagagggcgcccctggagagcccttgacagggttgtccttggtgaagtagcccacggggtagattttacccccactgtaggtcatgcctggggctaggtaactgttggcagagccacccaccacctcgtacccgccgtagggtttctggacagaggtgatgggaggacagggcttgcccgaggggccaccgttgctacagggcatgccttgaaaccctccagggccaccagagccatgttgctccaccaccaccactaccggcctctgcccacccgatacggtgtgggagttagagatgtagggccccgagtgtgtgatgacgggacccccactgcagggagagtcgggcacgttggagctacagggagggtgattggagacggtgttagacaccccagagctgtgggaagagtaagagcctccagactggaaggagcctgatgtctggcgggaagaattgtcatcggttggtagagcggagccatttcctggtccctcccggctgcttcctgagcttccagactgagaactgctgcttacccatctggaactgctgcttcccgactgggagctgctgcttcctgtctgagagccgctgcttcctgactgggagttgctgcttcctgactgaaatccactgtttcctgactgagagccgctgcttcctgactgaaatccgctgcttcctgagtggaaggagccagacccagaggaataggagatctgggaagaccctgttcctggtttaaatatcagggattttgaagatcctccctgggagctgctggatcccccatggctgctgatgctgctggagccggtctttccaatgagacaagggtcgttgagggaggtgatcctggtggggtccttacatgggtctgagagggtcccaatgctcttagccaaggttcctgagagagaaagcagaggtctgtaaggactagattggaacaggggcttccccgccacccctttagccccattccggagtctccaaagaggaacccgggtagaacagaagtagaaaaaggaagaattgttactgtctgcgaagaaaatgaaggtgacagaatcaggaggtgtcgttgttctagcagtggaggttgagtgaggaggtcagatgctaaaactctgaagtggtaggcattgaaggagtacccttcagatggggtgggggcggaaacgaataggtcagaaacatgggggagggggatgctgaagctctggggtagagtagaccatagaaccaaacagaagaacgtgaaaggtaaagcaagggttgggggcatagtgttggcttaacatgcacagggacataggtttgacacgcccccattaaccatcaaaacagggggagggtgtgctgagacaggaaggaaacataggagcccaggaagagagaaagctaatgcaaaggtaccggcttacagaagaggagcgcactccatagccaacgtccattgcctgccagctccctagggagagcccagactgggtaagggggggttagaagactccctgctacctgcccctgctctggccatgccggcaaacctgggtgggagccaggatgtgggggcactcacctgttgcttcagaacctgccggtaccagtgtgacaggacaccgcaccctgaaccacccctgccgctgctgtcccagcccagggacgggacatgaaaccctcctctccatggcctccctctctccccacccagccttcccgtgcacctgctgccccagtctgccccacatctgactccggctgcccttggaccatctttagtcctgatcccacctctatctccaccgagggactctcagctcctaaccccatgctcctcttgcctcagtctgtccccacggctctcgcctcaatgtcttctgctcaccccagctccttcagagcgtacatcggcacgtgactaaccttctctggtttatatattcaaaggggcaaagcgtaccatgccctccccgctgagccaccgggaaggccatataatagcatctctctaggaaacatgtccaaaagcagcgagctagacatcacaggtcataatcgatactcatgctggagtggccagtctgcgatcacctgcagtgtccccaacctcatctcaaaaagaaaagcttggtgtaccctgcaacaaaccccctctgccacagtcccttcacccctcctcacaggacacaagccacccagcctgggctcggaagccaggacgccctgcttctaactgcaatctgcagacagtttcctgtcccctcaggcctcctggaccctgagaagcagagtggggatggcaaatctatcacacagacctcaaaaatgctcatgtatttaaagtgctagctacagtctagcatttaacaaggccctaagtggagcatgcctgtagttgctttcccaccatcctagctgtcaggaggctgagtttgaagctaggctgggctacaaagcaagaccttgtcaaaaaaaaaaggaaagagggccaagggtgccgtagatcagttagcaagcatgcatgcgtgtagcctggggcttagctcccagcacctctgtaaaaataaacacataaataaataaataaataaataaataaatgcgaattgactgacacatctacaatgcttgtaaaaagcggctctgaacgtggtagcaactgttgtttctataaaatagccagatcgtatcttctagtggggctaccaccactcatatagtcatctggaactcctgaagctgtgttgccacgtgcgttatttaatttggtacagagactggggctagaagatattaacctcatttctaacaagctcagaacaattacataggacttggagggtggctgggaggcagagtgcctgcctgctcagccactgtggagcaaagcaaaaataattccctgtgcagtgaccacaggaaggtggccaggcaaggatggggagcagtcccggatagaaaggtcagattctagagcctgtgcccctctcctgggccctgtgctgcaggcactggacgcccccagcctctccaacctagggcctgtgtcccacactgtccctctcccaaggccccagactcctacctggaagaatgagagtggccatcagcaatgccatcagcccgtgccctcccacacgccccatcccgggtgcccgagaggagttcattgtgcacggtgtggcctcctgactgacagaaacccatggacaccgggacctttatgctggggctggacattccctgggcaggagtcactgtggggaggaggaggggtggagagggaggctgcctgagggaagttggtgtggcaggagagactgaagcaatcggtgtcacatgtgcccactcagcaacaggggtggctgcagggacctgaggccgctgggcactagcctctaccctggatggccttccctggctcctcattgcctaacctagaaccaggtgctctgccccgggcccaccccgtcaagggtggccactatcacccagggacccagccaccctggtcctccctccctgcctgcccaagccccatcctcccagcgtccctccaccggaagaagagagggcatctcgactttccctcctgaccccaagaagcaccctgctcctgctcatccccaactcaccccacgatgcagggcagctctgctggggctcacattataacccccacctgcttgcttccttgaattctgtcactcagtcttctcctcctgcttcagatctgaagatccgccctcactctgggcccccccactgcccgagcaccggcccgccacctttaaagtgtcccatggacaagcaaacctttttcccttctcagaaatgacacccaccatactgaaaacctgggggctcctttctggaggctcttgggagagctggaggaggggtgggcagagattaccagagcttggactagggagaggcctgggttgggacccctgtcatagctgggcctcagtgactcaggggccactcacagtccctgtcccatggtagtgacccagactcaggaggatgagcaagaggccaacgaggctaattgggaaggtggtgaccaggtggcccattagcctgctcctcggcctagatgaacaaacagaaagcatctgagctttgtcctgaatgggataagaagggccagtcagctgctgggtccctgagggaaggagggttagaaccctgggacccaccaagagggaggttgtttctcctgcactaaggcactgcctcctgctgtaacccaggctccaccccagccagttgctcactaatattgtgggagtatcagtatcggagtttatcctcacttggtccctcctcccctcacccaaacttcttcacaagggcatctctgcccctccagtccttgggttggtccctccctttctcccgaccctgccctgagttctggcccttgtgatagcaaatactgcctgtgtaggctctgagactcccagctctccccaggccacacaggctacaaatgggactggtgtaacccactgaggttttgggcttttgtttgttttatttaagttcaattaggtccaaacaaccatgtgcagctgcaggtggccaccatctagttcttcacttcctgctggtgcctagagctggggctggaaagagaaaaagtccagggagccctgcagacctcagtgaccaaagcacaagccctgagaggggcggtggaccaggacaacaaaacaactgtggctttggaactgcctgaccctggggctttaatcaatttaccaaccctctctgaactgtgatttctttctttacctctaaagtgggagacgggtgctcaggacactgaaggtggaactcagggacttacacacgctgggctgttggtcaagtgtgatgtggcacccaggttacttctctctctactgggactgtttctgtacttttctatttttttaaagatttatttatttatttaatgtatatgagcgcttttcctgatgtatgacattatgaccaaagaggacatcagatcccactatagatggttgtgagccaccacgtggtgatgggatttgaactcagaacctccagaagaacgaccagtgctcttaactgctgagccatctctccagcctattcctgtacttttttcttgtttaattttatgtgtatgtgtgtttggcccacatgtgtgtaagtacaacccatgtgtgtaattcttgaagaggccagaagagagcaattggatccccctggaactggagttacagatggttattagcctccatggttggtgctgggactcaaacccaggtcctctggaagagaagttagtgctcttaactgctgagacatcgctctagccccctgggaatattttaaatattacctgctttcaaaggtttgtaaagatcaaacaggaaattaccaaaaaaagagtaaattaaatgggaccagggtgtggtcccctgcaggtggctcagtggccggagttcctagtcgctctcacctatgaattccctttggaaaggcaagccaaacattcaccctgagtcctcacaccgagacagaatagtggaactgcagtgagtgcctccccaacccctccctagactctcaggccccagctaggaccaggggaaggagtccagctaaggcagggcaaacagtagcagggacaagacaagggaaaggagcctttgtggtctgagaatgtgggcatccccagatgggtggggagaaaacagaactctttccagtatcacttccccggagcaccagagtaggcaccctctgtctgtcttgtttcttctacacattcctccctgctgctgtcagaccttggccaagacagccgggctggaggaggcacagtctctctcggcctcccgccagcttccagccacccacacggtcacgggtcacgttcctcacctggcctctctcctcctgtgttctctgtccaccctttcccatcccccactgcccatatctgggacctagaagctccagtctgttctcacagaaactctgcctgtccctctttgcctacagtttccctccctactgtacccattacccaccacctgaaaattaatgcatggaaggcgctggggagatggctccgccgttaagaacactggctgctcttccagaggacccgggttagattcccagcaaccacatgacagctcacaactgtttataaataacttttgatgtattatgttgttaggactgtcctgctttactgtttatctcttactgggtctaattcatgagttagtctgtgtatataatacacatcatagtctgtgtatacagcatgcattacaactcagagaggatctggtgctacctgggcatcattaggctcttagattgtgccccctgcagagaaaggggctgctataccctgccacatctctccgggtcaccattaacctttcaacctatcgatgggcgttggtggcgcacacctttaatcccagcactcaggaggcagaaacaggtggatctctgtgagttcgaggccagcctggtctacaaagtgagttccaggacagccagggctacacagagaaatgctgtctcaaaacaaaaacaaaaacaaaacaacaacaaaaaaacctttgaacgtatcaactcaggcagcaaaaccctgaagccagaggggctcaggagtggacacaaggggagttggctgatgtctgcatagcccaggtaacctctggggggtgctcactgtggccatgggagagctgggctctatatcagagagtgagtgcccagtgtaacacactgatggggcgagaactgtgggtgaatcagagcaactccccccccaaaggaaacccaagttcaaaggatgggcctttgacaggcaggaagcccaggttgtcacaagaatgggagaacctcgaggccagcctggtctctagagggagttccaggacagccaaggctacacagacaaaccctgcgtggaaaaacaacagacatacaaacaaaaagaatgggagaactctatacattccagcagccctggccacagggagatgtggccgggaacgacctggccaaagaggaggctgaggtgaggtggcctcttcactggccgtccactaccagccttggggcagaatagcagaaatcctagtataagaattccatagagggggtcttagtcagcgaggggcttaggctggggagaaggaaatggacacagaggaaaggctgaggggctatcggtctaaggctcatctgaggctgcccacgggctcctcccttcgagttccagtcagagtcgtccctcttctgccctctctttctccatcacccatcggcccaggtggattcatctctagtcacataccttcctctccctccagtagaaggtgacactcctggcccactcccactgggcatgtcctccgagctgtttttcctgtcgtgtggatggctggccctgagtcacccacagcctttacttggtggctctctaggccaatagcacaaagggacaggatttatctgcgtgtagagttcttaccagtctaggctccctgtgacaggaaaatgactctagggtctttatctcttgtcagtcctccctcccgggagcactctgccagcattggcagtttctgccccatggctgacagccagccttcttcattctgtcctcacacagaccaaccctgcaacatgttgtctaggcttccaaacagggaatgtttcccttggacctctgacttggtgacagtgtgtgacatgtgtgtgtccctgagttcccaacacacagccttgggaggcacatggtgatatggcgtgtgcgtgtgcgtgtgcgtgtgcgtgtgtgtgtgtgtgtgtgtgtgcgtgtgcgtgtgcgtgtgcgtgtgcgtgtgcgtgtgcgtgtgcgtgtgcgtgtgcgtgtgcgtgtgcgtgtgcgtgtgcgtgtgcgtgtgcgtgtgcgtgtgcgtgtgcgtgtgcgtgtgcgtgtgcgtgtgcgtgtgcgtgtgcgtgtgcgtgtgcgtgtgcgtgtgtgtgtgtgtgtgtgtgtgtgtgtgtgtgttgtgtatgtgtgtgtgtggtgtgtgtatgtgtgtgaggtgtgtgtgtgtgtgtgtgtgtgtgtggtatgtgtgtatggtgtgtgtgtggtgtgtgtgtcgtgtatgtgtgtgtggtgtgtgtggtgtggtgtggtgtgtgtgtgtgaggagtgtgtgtgtgtgtgtgtcgtgtatgtgtgtgtgtggtgtgtgaggtgtgtgtgtgtgtgtgttgtgtatgtgtgtgtgaggtgtgtgtgtgtgtatgtgtgtgtgaatgtatgtgttgtggtgtgtgtatggtgtggtgtgtgtggtgtgtgtgtatggtgtgtgtgttgtgtgtgtgtgtgtgtgtgtgtgtgtgtgtgtgtggtgtgtgtgtatggtgtgtgtggtgtggtgtgtgtgtgtgtgttatacatgttcgtgtgggtgtgttcatacatgcacatggaagccagatgtctacattgagtgtcttcatcaatcacctttaaaattttttttttcctttttgagtcaaggtcgctcagtcgcctgcagctcactaattggccagactggctggcttcctccacccacacccaccccccacccccgacacacacacaccacacacacacaccacacacacacacacacacacacacacctcacacacgtagatcctagggatccagacacagatcctcatgcttgcccagcaagcacttggctgcctgagccaaatctgcagcccagtagctggtgatgtgtttttgattgtgggttgtgtccaagccacatggcctcttgctgcttcctcaagaatacatggtacctctctctggatcttacaccctacccttctccccttcctgacacatgcaaagcccccaggggttctgagaaggacttccagcgccaccccccactcatccctgtgctggagaacagagagcaggtacccagacctagacactgactccatgctggcttcgtctgtgccaccctcattcctcccaggtgactgactcccctaagctactcttctccctggtggattctattttctccccaaggaatgcagcgtgtctctactggcacagcaatgctcacgtggctgtggtgaggaagtacaggctttcccctggaccatgaaacggtcagatgctgggctggggtagggcagggcccactattgtaaaccccaggggctcttgtcctctccccgtgtaacatgttgtccctggctgagactctatcctgtgctcctccctcaggaggtctatcctgtgctcctccctcaggaggtctatcctgcgctcctccctcaggaggtctatcctgccctcctccctcaggaggtctatcctgtgctcctccctcaggaggtctatcctgtgctcctccctcaggaggtctatcctgtgctcctccctcaggaggtctatcctgtgctcctccctcaggaggtctatcctgtgctcctccctctggaggtctatcctgcgctcctccctcaggaggtctatcctgtgctcctccctctggaggtctatcctgcgctcctccctcaggaggtctatcctgtgctcctccctctggaggtctatcctgcgctcctccctcaggaggtctatcctgtgcagcccactgacctctccaggggactcagggagcacggtgaggactgggtcagagtcaggtgcatctttgggtttgaatccttaagtagaaagaattggcgagtgggggccccacacaccaggcgaccnnnnnnnnnnnnnnnnnnnnnnnnnnnnnnnnnnnnnnnnnnnnncagcacagagtcacctgaaggacagtcacgttccctgagctcagtgcatggtcctatttaagtgacatctaatttagccaccactcctcttgaaagagggtgtgattagctctcaggataacaaaatgtttttctcttgtctgctttgtggaacaagtgccggggaaccctgtgctcatgaggaaggctcaattagcgtgcctattaaactcctccattgtgcccagtagtgcttgttattggtcacccgaatcggagatccaactccctctccagccaggacagactcagagacgggagggagggtcatagcacagtctgcacgtggtttcatggcctccagggaggctggaaggactggtaccaagagggacttccaggcctggtgtggcatccccgtgggccatctcctcccagctcttctggtgtgttctctctggggtctggtaggtcggctcgcacaccaggtaagcggtaatgggactgtttgctgtagggaccgccctcagggctgcacaaccccaccagggagcaaagccagttcttagacgctgcaacccccaaataccctcacaggcaggtctccaggttctctgtgactcaagcaggtggagaattcccttctggagtcacaagcccaagtttagaacatcagcacgacgcccactccccgaccgggacttcaccccggatcactgacctgtactctgctaacacacagagctactgcttctcccggatgctcccatgatgcctccatccctaggtccagtctttttttgtcatctgtcatctcctcagggagggtatcccacgactttttttacttaaaaatacaaaacgtcgaggcttgaaagatgtctcaactccagccctcctacagtgagatagaaggtagagatggagatgcactcactcacgggcttgctggctagacagccgatagtaagctgccgtgccccaacaaggtgaaaggagagggagaggagaactgtctcctgaaagttaccttctgacctccacacacgcgttctgtggcacactcataattagtaattttgaaagtatgagccgggcgatggtggcgcacgcctttagtcccagcactcgggaagcagaggtaggcagatctctgtgagttcgaggccagcctggtctacaagagtgagttccaggacagcctctaaagccacatagaaaccctgtctcgaaaaaccaaaaaaaaaaagaaaagaaaagaaagaaagaaagaaagaaagccaccccccactcatccctgtgctggagaacagagagcaggcaagggctaagaaactctagggttccctctggcggcaggtacaggaacagcaacgtaggagaaatgagttcgccgagaagcctggcctgggtggtgaaggctgcaatcccagcacctgtgaggggtgttaggataaagctcatgggggacctcggcggattccatggcaggctaggtaaccgaggctggagaagttttattagaaaggggagggtggggaagggaagagaaaagaggtgaagagacacagagacagagagaggaccgaagagggagacaggaaaagtcctgtctgccccagaggaaccgcggggaagagagcaggaaagagcataagagggccgggtctgtcttttaaaggcatcctttgcacctgcgtgcagactatgcaatcatggagccctgggctgactggggtattgcctgagtgcgttctgccaggtgacaggtgccggccagcttaatttctgaatccttacgagacggagtcacgaagatcagaaattcaaggtcatcatcatacagcaacttcaagtgcaacctgggctgtgtgagaccgcatctgaaaacacagaatgaaaagcactaggtgtggtggttgagcaggaggactggctgcaagttcaaggccagcctgggctacatagtaaattccgggcaaggcagggttgcaccgtgaaatcctgtctctaaataaataaataaatagttgggtgctgtggtgtatgcttgcagactctagacccagttactcaggggctaagtgaagctggagtttcgagacagggtttctctgtagctttggaggctgtcctggaactcactctgtagaccaggctggtctcgaactcacagagatccgcctgcctccacctcttgagtattaaactaaaagcgtgcaccaccacttcctttggtcctggggttttgagactaccctaagcaacagaagagaatcttcccttaacaacagcaatagcagacaggaagaagtcacagatacggatgtgcctcagtggtagagggctcgaccctcctagcacataggaagctctgggttcaatgcctcgtaccgggatggtagtgcgtgagcgtgaacacacacacacacacagagacacactcagacgcacacacccagagacacacacagacacagacacacacatacagatatacagagacacacacagacacatacacacccagatacacacacacagacacatacacacatacagacacacacagacacacacatacacagacatacacattacagatatacagagacacacacagacacacacacacacccagatacacacacacagacacatacacacatacacacagacacacacacatagacacacacatacacatacccagagacacacacatacacacatacacacacccagagacacacacagacacagacacacacatacagatatacagagacacacacagacacacacacacccagatacacacacacagacacatacacacatacacacagacacacacacatagacacacacatacacatacccagagacacacacatacacacatacacacacccagagacacacacagacacagacacacacatacagatatacagagacagtctgcacgtggtttcatggcctccagggaggctggaaggactggtaccaagagggacttccaggcctggtgtggcatccccgtgggccatctcctcccagctcttctggtgtgttctctctggggtctggtaggtcggctcgcacaccaggtaagcggtaatgggactgtttgctgtagggaccgccctcagggctgcacaaccccaccagggagcaaagccagttcttagacgctgcaacccccaaataccctcacaggcaggtctccaggttctctgtgactcaagcaggtggagaattcccttctggagtcacaagcccaagtttagaacatcagcacgacgcccactccccgaccgggacttcaccccggatcactgacctgtactctgctaacacacagagctactgcttctcccggatgctcccatgatgcctccatccctaggtccagtctttttttgtcatctgtcatctcctcagggagggtatcccacgactttttttacttaaaaatacaaaacgtcgaggcttgaaagatgtctcaactccagccctcctacagtgagatagaaggtagagatggagatgcactcactcacgggcttgctggctagacagccgatagtaagctgccgtgccccaacaaggtgaaaggagaggnnnnnnnnnnnnnnnnnnnnnnnnnnnnnnnnnnnnnnnnnnnnnnnnnnnnnnnnnnnnnnnnnnnnacacacacacacacccagatacacacacacacacacacacacacacacgtatacactcagatacatgcacatgcactcacacacagacacacacacacccagaatcacacacacagacatacacatacagacacacacacacagacacacacatacacagacacacacatacagatatacagagacacacacagatacacacacacccagatacacacacacagatacacacacccagacacatacacacacacacacacacacacagctgtgaccacagcactcaggaggtggaggcaggaggatcaggcttttgaagacatcttagctacgtggagaattcaaagccagcctgaggccaaatgagagcccatctcaaatagtaaacatcatgagtgtcatgatgggtgacacttaaggtgcagctcaagggtgggacatgtaactagtgtgtcgagtatgaggtcctgagaatcagccccaggactgaaaaagagagagagaaaagaaaaaagaggggcaaagcaagagaggctgagctcacggcaaagcaggtctgtgtattcaggagaatttgaggatagcgctggcagacacttggggctcccctctgacttaactggaaaggtcctattgccaccatgattgacatgtttgttttttccctggcacacagagccccttgagggcagggaggacagcaacaagctgtacccgcacccctcatgacagaagctcagtaaatgctgaatgtgtggaaacaggaatgagtggttagaggctccctgcctgagatctccccaggcaggacaatgcgcctcactgtcctgaggaggatgttctcccgctctcccgcctggagtctgtacctcggctccctcaagtgctcagcttctattattagactgtcccacgaaactagcccagctctttcctggccaagcatttattgactgtcgtgtccacctagatattgttatgcaaaactgccattctgtttcatcatgtaattccatgactccctgttgacacaagagtgcctatgcccactgcaggcacgctctgggcagagaggaagtgacaatggactcctaaccacccagtcccactcagtctcctcccagctagtaaaacatgccgtgtgtcaacgcaaatacatactattaataggaactgaaacccccggttacctcatcccatcgtcccactggtccacctgctgcatccagacaagggtgagctggagccaggagccctgcactgcctgggctgcactggcagcgtgtctcgagcaggtgaggtaactcttattgctcaatgtcttctcccccctacctcttccctttctctcttcctcttccctcccttcctttctctcttccttcctgccttccttttccttaatacaggacctcagtacattgcccaagctggtctcaaaccctcagtcctgcttcctcaggctcccaagcagctagaactacaggcaccacccacacccggcctcagcacagaatcctaacctttgaaatggggctaagaacttgctttgttgaacaacttttggctaagtgttgtggaccagaaaaaggatacaaagccagcaagccccaacctctgcttcagggatctattctgtttgctgttgttttctttctttttggcttttcagacaaggtttctctgtgtagccctggctgtcctggcactcgctctggagaccaggctggcctggaactcacagagatccacctgcctctgcctcccgggtgctgggattaaaggtgtgcgtcaccaccgcccagctggtgctgcacacttttgatcccagcacttgggaggcagaggcaggcagatctctgtgagttcgagaccagcctggtctacaagagagagttccaggacagcctccaaagccacagagaaaccctgtctcgaaaaaccaaaaaaaaaaaaaaaaaacgtgtgcagcaccaggagagggaaagacatagaaaacagagcaacagaatcaatgtggatcatgagagctctcgctccttaactgggctacaccagggcctgcagggctagttcattcctttaatttcccacctttgttaagaggttagtattggtttttatttccccaatgggctgagaatgtccctcagtgaaaaatcttccctggaaagtctgagggtagggaaattggcacattgtaatctcagtacttgcaaaacctggagttccaggatagcctgggctacagaagtccttgcttaagaaaaaaaaaatagtaattaagaggaaaaaaagaggttgaggaggaggctgggactgtaactctgacagtagatttgctggcctgtgtaactcagatggtagactcgatcgcctgacatacacaaagccctgggctagattcttgccatggtagtgaccacatgtaacactaaggttctggagatggaagaaagagattcagaaattcgaacagggaagaaaggcaggacttactgacgcatgtctttagtcccagcccttgggaggcagaggcaggtggatctctgtgagtttgaggccagcctggtctacatagcaattccaggacagccagggctatgtagacagaacttgtctccagaaaaaaaaaagaaataaagaaagaattaaaagaagaatgaataaacagaagagagaggaggggaaaggggggagagaggagaccctggccttagcatcctcagcctacccaacagtgtctgtccctcaggttacaaagacttcccagctaccatttcaatccattctcttgccatttgttggtggattcagctattcctaagatatgaattatggggctggagagatggctcagcggttaagagcactgactgctcttccagaggtcctgagttccattcctagcgcctgtgtatggtggctcacaacgggaggctcacaaccctctgtaacttcagttccagggatcttaagccccctgccgccccccccatcaggaatgtataggatatgcaaacctacatgcaaacaaaatatccactcatccatacatacacataaaaataaatctttttaaaaagcatgcataagggtgcaggacacctcagcgccaggcgctcccaaatgggtgtagtgtagtagtagtcaaaactagagttgttagggcagcatcaaccagacttcactgtctcctgtgtgatctcaggagtcactgtcttctcccaggccctacctttctctctcacccaggactgtgtcccctcggccctgccaggacagcaacccgtgtcaggtgagagcacagaatgtggggcagcatctttgcttgcactgcgcatgcctgagcctctggcttgaactttggagaccctcctactccggccacacttgctccagggtctctcatggcttcctgctgtgactattccacctacctcactgtgactcccaggactgggctttggccctcacacagccatttagttgtcagttactaaggaatgcaaatcctgtctctcctggctccaagttcctgctggtggaatcacgttttaaatccttttttgttttgttttttgtttttcaagacaggtttttgttttaatttttttgttttttgtttttctctttctttcctttttttttttttttgaaacagggtttctttctctgtctgtcctggaatttactctgtagaccaggctggccttgaactcagagatccgtctgcttctgcctcctgtgctgccactgcctggctcagcctgctttttttacacagcccagaatcacctgcccagggtggcaaagcccactgtggactgagccctcccacatcaattattcaccaagaaaatgtctcacagacttgcctacaggctaatctgatggaggcattttatcagtagagttttcctccttccagtttattttgagttgacaaaaacaaacaaacaaacaaacaaaaaacataactgaaatacgagtaattttttttttcctttttgagtcaaggtctcatgtagccttgaacctagctcttgatcctcctgccccagcctccctagtgttgggattacagatgtgagtgactatactctgtttagaggtgtaaaaattaaagattttaatgccaggagcttcaacttcttttagaatctcttcaaccccaagtctggtcagccactcactggactaacaccaggtggcagggatctatgaatctgtcctttgccctttgaactcgaatgctcccttaatcccaacactgaagccggctgtcccagctagggtttctattgctgagatgaaacaccgtgaacaaaagcaagctggggaggaaagggtttatttgatccttattggtccatcattgaaggaagtcaggaacctggaggcagaagctgaagcagaggccattgaggggagctgcttactggcttgctgtgcctgcgttcttatagaacccaggatcaccagcccaggggtggcatcactcgaaaccagctaggacctcccctgtcaaacactaattaagaaaatgccttggccgagcgttggtggtgcacgcctttaatcccagcactcaggaggcagaggcaggtggatctctgtgagtttgaggccagcctggtctccagagcgagtgccaggacagcctccaaagctacacagagaaatcctgtcnnnnnnnnnnnnnnnnnaaaaaaaaaaaaaaaaaaagaaaagaaaagaaagaaaatgccttgcagctggacctcatggaggcattttctcagatgaggtatcaagttgaaataaaaatacccagcacacaggcagatctctaattggaggccagactgggccactaagtgagactctacctcaaaagtggggcggggcaggcatggtagcacacgccttctttaaacccagcactagggaggcagaggcaggtgtatgtatgtaaatcaaggccagcctggtctacaaagcaagttccaggacagttgaggctacataatagagacaaaacaaaacaaaaaagtcacataaaccttttgaagatagaagataagatataaaccctgagcctttcatttccatctgcaagccttttaaattttatttttatatgtatgagtgcttagcctgcatgcatgcatgcatatctttgcacgcagtgcccacagagagcagaagagggcgtcagaaaacctgaacctacaggcagctgcagtcaccatgtaggtgctgggaatgaaccctaatccctctgcaagagcagccggtgctcataatcgctgagccatccctccagccctgtgtgcaagcctcttagccggtatgaaatcgccttttccctttttttttagcttcccttcttcccatcccctagaattttctcctagtgaaacgtttttcactgtatttctttttccctccttattctcctctcatacaatgcattccgtctgcagtttcccctcccagttcagctcacacacacacacccctctcccctagttccatcctcttctgtttgccctcagagaagagcaggcctcccagggatgtcaacccaccacgggataacaagatgcaacaagactaggcgcaaaccctcatatcaaggctggatgaggcaacccgggaggaggaaaaggtcccacgagctggtgaaaaagaccccctcgcttccacaggactccaagccaacaaccataacacagatgcagaggacctagctcagacccacgcaggcaggttctgtggttgctgcttcggtctctgtgaggcctgcttagttgattctgtgcggtcaactcctctggctcccacaacagcttcttcccggtcttccacagggttccccgagctccaagggaagggactgggtggagttccccagtttgggcgctctctctctccacctaatgtttagctgtgggtcggtctctgcatctgctcccatcggctgcttaggctacgcagaaacctcttctctttgtatttctttgtgttttctatctctgaggctctcatggatctccgactgtcctcaaactgtgtatgtggctgtggacggaacctagggccttgcatacgcttggcaagccctctaccaattgagccactccccgcccccccttttttttgtttgagccagtgtttcatgtgtcccagatggcatctaacttgacgtgttgttgaggataaacttgaactgctgaactttgtcttcccttcccaggtgccaggcttaccacagccagttcataggactaatgggtattaaatagttattcagcacagaattcatattacaactatcataaaacaaatattaaagctaaaaatactgattagacactaaaaacaaaactttcagagaaagtgcatcttaaagccgggcggtggtggcacacacaggcggatcctcggtgagttctaagccagcctggtctaggaagtgagttccaggacagccagggccacacagagaaatctgtctcgggcgggggtgaaaagaagcagcagcaacctagactcagaagtacagaaaaaaaacctggcttttattttccctttgggagcgcaccatcctggtcaattgtcatgtcacagctgagaccaccaggtggcagtagggagcacagtgctcaggccctccctggaggtccaggtctagacaccctgggaagaggaagcaggaataggttgggtgaggtaggcgtgtgttttatgttattctgaccaagagaggcagaggggctgaacagggaccccgaggtgaaaaagcaggtatgcagaacacagacacctgaacacaatccaaccagggacttaggaagggagctacaaaagggaaaattgagattttaaggagcagcagaggaaagaggtgggtttgagtgtgcgctcaggaggctcaaattccctggggcgcctccctatctgtactcttcctggggtgggtcaaggtcaggctcctcttgcgatccgtggtccatctcaggggcaggtggccaggggttttctgggggctgggtgcctgctggccaggggtcatcgggcagaggagcgtgaggggcatcagtgctgggaggctctgggggccacacaccagcattgggcaggtctctccagggacggttggggcctggaggtggaggttcatcaaagataggaggtacccctggccacgggtcaccagggattggggggcccaggggcaatgctggggagtcctcctcttcttgggcttctgtgggtctgggagaggggtctccactgcctgagatgcctgtagaggagggaagaaaagcgatgcagtcacagagcactcctcacccagcctcagacccaaaggctgagcctcccttagaccagcacagcccgagctggccccaggatggacctccccaaagagcttccaatacatttcccgaatactgaagccatcttcacaagaaagccctgggctcatcgaggccccccacatgatcaagccttcaaatagctctgtccaacctaggttgggagaccccaccggaactaccccaaggctggtctgcacctatggtggtcttggccccatctctgttatatataaccagtcctcaacacagaccccccctccccccaaactcccgtcgcatccatgcacctgacctagcaacgtattcaggaccaagtccctgccggccttccctaagtatccccactatggcccgtccagaatccctttcccggagcttcccgctaatgcttgctgagcattatggctgtctaccggcccccagagtggggtgctctgagtctaggtgcttgagaacccgacaggctttatagtggaggagggagaggaggtggccagtctgtggggaggggccagccccgtgacgaggattccccatcagagtccgactggtcagacccgtttacagagcccgggacagcccttcagtcccccagcccaggtcatcagccaggtctccctatcagtgacccagaccccaggagaccccacccttgttttcatacctcctccttccacacccggcaggcagccgcgggtacccacctgtcatctccataatcacagggaaggccacctttcatccctgacagctattggaagccacaaaacgggggcaaactctgcgtggggaagcttgctaattacagggggaggcaggacgcctgggtcagctagcacccccgggctggcatcacagccctggggccccctcccccacttccctctggaccagggaggctgctctggcctgtctctttggctacaggaggacctcccaggcggtgacatctaaggaattccatggggagccacctgggtgactacaagccaggatatcctggttcctgaccccatgcagagaggggttgagtcaaccacaaaggctcgggaagacgcacccccacccacccatgtaatcgggtttcttcctccttagcatcagggccctgcgccctcctccccaacccctccatgagaactccgttccccctcacacacacacattattccccacctggtctttttggttactgcatcttcttcacttgaaagccctgttcccagagcactcgccctggctctggcctatctcactcagttattcttccttcctactcacacagattttttttttttaaatgtgaatgggtggggtttttaaaattttatttttattcatgtgcattggtgttttgccatgggtgttgagttggttccctggaactggagttagacaattgtgagcctccacaaggtgctgagaattgaacccaggtcctctggaagaacagccagtgttcttttttggagggagggcggttggagacatatattatctgtgtagctctagctgtcctgaaacttgctttgcagaccacactggctagaccaggctggccttaaactcagagatctgcctacctctgcctcctgagtgcctgggttgaaggcatgcgccagtgttcttcacgctggagccatctccccaacccatccaaaatccctttacaacacaatttggagcagctttggagtaaagtcctgttgcaagccctgttccctgctgagccctgagcctctgccctgagccccctgcccccatgccaccgtcacagtggccctgggctgggaaagtctctgtctgctctgagactcttcttgaatgtaccaggcatttgtcagcacccaaagaaaataattgctaaacaaaaagtgaaggtaaagaaaacttggtccaggtagccgtgacacatgccagcactcgggaggcagaggcgggtggatctctgtcatttccagccagcctggtctacacagcaagtttgagggcagccagggctacatagagaccctgtctgaagaaagaaaacttgagaggcagaggcaaataagatccctatgagttcaaggccagcctggtctacacacatggtgagctccagggcctcgtggagaccgtctcaaaagtcaaaacaaaaccaacaacccccccccccaaacctaggaacttctcaaaacatgtccggagcagttaggaagggggtgccactcaggggaagggtggggtgcttcccttcaccccacagcctcaggagctggcctcagggagaacctgtctcccagacacctccaaccaacagctccactacagccatctttattttttgcggaattcagccttggtggaaggaagctgggtaaccaaggcttgccgggaaacaggctggccgacatcgtcccaatccaaccatcctgggggatccggctccaggctggctctaggctggcttcaccgccgcccctggcagctccggctcagcagcagtctgacggggggcactgagtgtactgtttatcttctgggcatgtagcctcctctctggaaatggcctcgctcaggccttgcaggttttcgaacagggcagtcagggactctaacacagaaggtgttgcagggtaagaagagcaggctccgtgctgcccagggcactggtgtcgaggaaaggccaaaggcctttggggctcgacaggggcgtgtgggtgtaactacctttcgtacactccctgggcggtgaggccgctggacacccgtgctctggggatacctcaggctgagggctgaacctcacggttttcttgtcggttcccaggggaagcattgccaacagccgctgctgcttgtaacgggagaggagaccctcctgcctcagggtggcctgggaaggagagggtcagccgcaccgcacggggccacgcaaaccgcccccaccctcccctcagacacctctactcacccaccagctaccatgaccgcgctccctctgtcccctaccagcatgaggtttttgtccctctcgagctcctgcactctgcgggccacacgctgagcctcctccttccgggcctcatcctgaaggcgtctgagctcctggttccgctccttttcccgcgtggctctgtgctggatctggcgcaaggaaaccactgaggagatgggagtgggtcagcccggagcccaaaaggtgaggcctagttctcaactctggctctcggggtctcttccacacgctgagtgggctggtgccaggggatcctgggctctgtgaaccccaggtgccttcctcatctctgataccagttcctcaggcaagacctggacccccaggagctggagtcagagctcctgtagctcgctggtcctcctgtggtttgtgctgcagttgtttggagccaggcctcactgtatagcccacccaggctggccttaaaactatcctgctgtctcttactctcaagtgctgggctgctaggcaagtgccacccaccatgtgtgcctagggctcatggatcttaagacactggggtgtgtctgtggggtgtgcagctgaaccagcatgtctgcaacttacatgactcaaatgtctacatatgtaaccatgggtgcataggtgagagagaggggtgatgactgcgattacaccgactctcactcatccaagggttaagtttctgatgacagtggtgtccgctgaggggtaagtgacacaggcccaggagccagagaggtcactagctgtttcttgatctggcattagatgcagtgtgattgctaagtaagaattcatcattcacgccattcctcaatttcttcactgtagacatgcgcccggggtggggtgggattgacagccctaagtctctgccgctgctttcttcctggaagggccaagtcctccccagcagatctcaccggccttggcctgctccctccgcgcctcattcagcctcctctttgtgtctgagagctgttcccgaagccgagtttccacctcggccaccttctcctgcagagctgccgtgagggtacaaggcagtgtcagggggcacacacggccatgcacatgcctcgcagggccatgctcacacagccacactcacgctggcacgcaagcaccaccacgctcccacaccttgcccgtagatctgctgctgctgtgtcagctcctgccggaggttggcagcttcctctgtgctctcctgctgcccctggcgggccgactccagctgctgccccacgttgaccagggactcctgggcacgctgcagctcctgctccagctgctgggccacctcgttcagctgcaggcgctctgcctcccctaaggggaagtttttgtggtcacacatgatctcttctggcacctgagcctcagaccccaagtcttttccagcctcatctgtccatccgtccatccacccagacaagcctaccttgctcccgggcccggcccacctcctgctggatgatgtgggcactcagctgcagctcagcatccaagcggttccgttcttcccgaaggtgctccaactcaaggctcaggtcggcatccactgggggtgcgggtgggggcgggggacagctgggacagaaatgacaaaggagtcagaggaaattccctcagcagccacctgagcggcgcctccatccctccatggtcctctctgcgtcctggccaccaataccggattgccctcaatgtccacacaccctccacctctgtgtgcctgaacttcacctttgcaggcgcagctgagcaagggacacttttcgagccatcaaacctgaggaggaaaggcaaaggacaggaagatgggtatacacagacagaaggacagcaggagcacaggccaatgacagacagacagaaagacagctgaagcacagggcagtgacagacagaaggacagctggaacacagggcagtgacagacagacagaaagacagcaggagcacagatcagtgacggacagacagacagaaggacagctggagcacagggcagtgacagacagacagaaggacagcaagagcacagggcagagtgatcgttaccaagacaacagaggatagatgaggttagatctagggctgagaggcagggggccaggccagtggggacagacagaaggacagcaggagcacaggccagtgggacagctgcgacacacacccttaatggtgtggaccttccggatggcatagctgagtcggttgctgaggctgggaatccgggctacagtctggttcagcctggtcatggtgccatggatgctgtcctgagtgctgtaaagacacaggtcactcaccttccaccctcccctcacctctgaaggacccacagggtgtatgcacaggacacgcttgtcctatcctgttacatgagtggggaggtgggctgtaaagcaacaagaaaaagggggaacaaaagccaccaggagggacaagaccttagtggatcttgcaagtcaaccaagctccttagcagatcttttttttttttaagattttatttattaattatgtatacaacattctgcttccatgtatatctgcacaccagaagagggcaccagatctcataacggatggttgtgagccaccatgtggttgctgggaattgaactcaggacctctggaagagcagtcagtgctcttaacctctgagccatctctccagcccctccttagcagatctttaaaaatgcctgccagataaaaacatccagctgaagccaggcggtggtggcgcactcctttaatcccagtgctcagggcagaggcatgaggatctcttgagtctgagaccagcctggtccagtagtccccctgggggcaggaggtgcgtgcaatgctttgaatcagggcagtggctctttgaatctagtctgattctctgtgggttttaaagtttcatctttttttttttgtttgctttttgtttttcgagacagggtttctctgtggctttagagcctgtcctagaactagctcttgtacaccaggctggtctcgaactcacagagatccacctgcctctgcctcccaagtgctgggattaaaggtgtgcgccaccaacgcccggctaaagtttcatcttttttttcttttttctttctcttcaagtgctagggatggaagccagggattcctgaatgccaggcaagtgctccactgtgctatagactgtacaatttagatgctttccaaactaaacagggtgtaagagcacaggaaaggaggaagggacgggggaggtttggaccctccatgtcctatcactgagctgtgaagcccgggctccacctagctgccctacttagcttcaaaggctacccgacggaactgcaggaagcaggattccccagctccagacaggttaaattcacagcgggagacactgccaggcagagatgctccctcccgcctgaggcctgaggctcctcagggtcccagaggcttgggaagctttgccgccctgagagataccttttcatggcgctgaccacgaacttcagctgctcctcgacagagtctgtccgctgcttctgccgccgcctggcctcctgagcccgattcagctccatttgcagggtctgggaggatgccgttttgtgttcgtgttttctcttaagcctcctccctgttgtctggcccacagacccgcggcagccccagggtctccctcaccctccctccagtctctctctctctccagctcacagacccgcggcagcgcccagggtctccctcaccctccctccagtctctctctctccggcccacaccttgatgctcatgcgctccacctccagctccgccgctttgtcttgcagggcttgctgcaagatggcctgctcctggctctgggccatcacttgttcctggagctctgctacctggaagagcagagggagctgggcaggcaagtcgagagccaaagccgcgcggaacgccgggtttgaaggagaatcaaggagaccggcagaatctctgaagtggggctagagacactggctcggcggttatgaggcactggttgcttttgcagaggacctgagttcaattccctctaccctcgagatgggtgtgatggctcataaccgtttgttactccagttccagggtggccaacacattctgacttccatgagcacacagtacacatacatacacacggtcaaaacactcctacacacaaaataaaataaatacatccacagctctggttaccctggaactcactgtgtagaccaggttggcctcgaactcagcgatctgcctctccctaagtgctgagattaaaggcgtgtgccactacaaaaataaatgtataaataaataaataagccaggcagtggtggcacacacctgcctttaatcccagcacttggtaggcaggaataggtggatctctgagttcttttcttttctctctcttataaaatcttactttattttatgtgcattggtgttttgcctccatgtatgtctgtgtgaatgtgtcaggttgcctggaattggagttacagactttgggagctgtcgtgtgggtgctgggaattgaacccaggtcctctggaagagcatccagtgctcttaaccactgagccatctctccagccccagatctctgagtttgaggctagcctggtctacagagagaattctaggacagccagggctacatagtgaaaccctgtcttgaaaaacagaaaaaaaaaaaaaaaaaaaaggaaagcaagatgagcagtggtggtgtacccctttaatcccagcacttgggggcggggcagaggcaggagaatctctgagttcgagaccagtctggtctacagagtgagttccaggacagccagagctacacagagaaaccctgtcttgagaaaagagaaatcagcacagcacagcagtctgagggtgaggagctgctggagcttgcaaagggcccagctcttctttccgactcatggtccactgaccgcactttgagagaccatcctcacccttgaccacaccatgccctgatgggcgcagtcgcctcctcagaagctgtccctgaccgtcatcctacctatcccatttcagtcttgacattacccactctcctacttattggttcaccttccttcacaactgaagctccgtgagaacacgtgaacagaacgcggccaccacccaaagcataactgccatcattgtgtggggtgctgcatgcagaatgatgagaaacagagcccctgacctggtccctcagccccttcatggagtccctgtgctccaggtcctgggccttgagttgtaccatgaggacaaacaccttttcccgccagctgctcagcagagatcggcacttcttaggatactcgggctccagcacatctgaaggctggatctgcatgtggaaagagttacttctgagggagcaggaaggggtgacctttgttgttcctgtcctgctggggcggtggagtgaggttttgggatcctagcgggatcccaactactgcccccagagagggaaggccagggtctggcggatgagggagggtcctaccttcctggtcagctcctcttcctgcagggcaagcatgtgcgtgaggctctgtacccgaacctgcagcaactccacggtggcctgaaggtcagcccggtcctccctcaagtgctggaagagcatggtcagtcagggtctcctcactacatgcaggtggtgggcagtctaagccgggtgagtgagcggcgacagcatggcctcccttcccgttcctccctcctgggccatccccatccccacctgcacggtgtctagaagctcctcccgttctggctcccatgcctgcctgtgaacctcaggagggacttgttcccccacgtacttcctcagactttccaccaaggtcacctgagcttccagctcttcttgagtcttgctagggtggaggcagaacccggacagtcctcagcggagcagcccagaggcccccaccatgccacctgcccggcccctccctctctgctgcccctgccctgccccgcccctgcccgctgacctcagctgaccccgaagcagctcggtctccttctgggccaccgacagctgtttgatttcccctgcccgtttcatttccaggctattcagggccctctccaagccctcggccttgctggtcagactggcaagagccatctcgtgagcctgggtcattgaggatagctgtggaggaagagcacattcaaggccagccggggcaggccagagtgcgtccttctcttccaagactcaagtctcagttctcagcacccacagtgggtggttcagaggtccactcttctctttatcccctccacacatatgcagtgcacactcaccaacacaacacacaacacacgacataaacaacacacatgttggtggagcatgcctttaatctcagcacttgggaggcagaggcaggcagatctctgcgagttcgaggccagcctggtctacagtgcgagtgccaggatagtctccaaagctacacaaagaaaccctgtctcaaataacaaaaaacaacacacacgtggcacacaccaacacaatacaccatataaacaactcccacggtgcacactcgccaacacaacacacaaaaacaaaaataaatctttaatgtgggcagcacaccccagcatgagagccctccaacagatcaacctgctataagcaaatggagaattctctgcatctggttcttcccggttagtttcaaacaatccaaactatagtatagtcaattcctgcctgttcacttccctgcctctctgtgtccactgctaacacctggagtaacccacgcccgctgcctcatgcctgagtgtttgtgggctgggaagatggctctgccagttgcctccttcacaagagcgaggccctgagttgggatccccacaaactatgtaaaaaggtgggcacacctgtagtcaccccagctctttgagatggcaggacacacgggcagacccctgaagctcccaggctagctggtctggcctgcctgacaaagttacaggccaattaaaaaccctgtctcagacaaaagggacgtgaggacccacacctgaggttgtcctctgacctccacaagtgtgcatagcctcacccacctacatccacagctgaatgtacacacactcctcagtggtgctgagcatggtggtggcagatgcctataatccatgtgctggttagtttttggtcaacttgacatggtaaaggttttttgggttttgtttcgttttgtttttgatttttcaagacagtgtttctctgtgtaacagtcctggctgtcctggaactcgctctgtagaccaggctggcctcaaacttaccaagatccaccttccaagtgctgggactaaaggtatgcaccaccgctgccaggctgtcaaggtaaagtgttttggggagcggaacctcaactgagaaaatgcatccatcagactgtcctgcaggcaagcctctaggacattttctggattaatgattgatgtgtgagggtccagcccacagtggggtggtgccacccctaggtaggtagttggtcctgagttatgtatgaaagcaggctgaccaggcctcgaggagcaagccagtacacagtgttcctcctccttggcctctgctccagttcctgcctccacctccctcagtggactgtaaccagggaaatgcaagccaaacaaaccctttccttcccaggttgctttttgtcacggtgctttatgacagcaaatagaaatcaagctggagacatggctcagaggttaagagcactggctgctcttccagaggtcctgggttcaattcccagcaaccacatggtggctcacaaccatctgtaatgagatctggtgccaccttctggcctgcagggcagagaactgtctacataataaataagttaaaattaaaaacagaaagaaaacccaccaggtggtggtggcgcacacctttaatcccagcactcaggaggcaaaggcaggtggatcactgtgagttcgagcccagcctggtctacaagagctagttccaggacagcctccaaagccacagggaaaccctgactcgaaaaaccaaaaaaaaaaaaaaaagaaagaaaagaaaaagaaaaacctaagatgttcttgggaagctgagtcagaagtagtgcctcaggttcaaggccagccagggctatatagcaagaccctgccttaacatcctccccaccccctaatgccataggcaccaagcctgctgcctgacagtgcatttccccaagctctctcctgaggctctccctgctccctttgttcaggtactgtccctccttcaggaaggcctctcatcctttccctgcctgcagctttctgagcactggcggccccagatgacggccccagctgatgctacatcagcagctgaccctacttcagcgtgtcctcatgaggatgctctagggtgggagggccttcacactagaccccaggcagtgccaggggcatcagagcagcccgagctgtggaaccagtgggtaaggtgtctgccctgcttcctcctgcaggatctgccctgctgccagccccttctctacaagtatctgaaatgaagcacgaagtctttttagacataaaatacaaatcggattgggttatttccctgctttttcccctggagcctggcatggtggtgtgcacctttaatcccagcacacgggaggcaaaagcaagaggacctgtgagctgcaggctagccagagctatacagtgagaccctgactcaacaacaacaaaaaccccttcttttccggggactctggggctgaacctgcagccttgcgcacacctggcgagcactctgccagtctcttaaaacctttcactggtgtttatcatctgtccacctatcagcagttaatctcgctcacaatgactgtagagtcgacttctgcactcggtaccaattacacgggttatcaaatatcaaagcagggtgtctgcttagtgaagcgaccaattcggagaaccttctcggtgatgactcacagggcagcaagccaattgctgccccgatatacaaaccagacactcatctttaaagcctccctccctgcctctccatcgcctgaagtggccctccctgtccctagaccacattactgcccctgcaccctgaggcactttcccagctgcaactggcttataggcacacgtcctacaccagactgtaattcccttcttgagaagagactgaggcaacttgctcgctcaactgatccccagctagctcctacctcaaggatggcaaagagaagacacactgggcattctgactggacattcaatccttcccagtcttctgcaggacccaaaccccacttctccactccctccctccaccatatttcccagaagagtacttggcaccgaataggaagaaatactacttccggagtgcaagctcacttggcttccaagaaacaagtgcagtccaaggaagacccaaatacccaagttctccctgccgagatcccacggctctgctgctacgaggctccctgaaatttgctggaaagtgcaccccgaaaagtttctcagccccgctcacccccatgttcacctgctcttggtgcagagtctgaatctcctgcagttccctctggttcccctcctccaggttcttccggaccatctcggctccagccaaggcagcgcgcaggccctcagcctcagcttggccagctttctctgccaccgcaagagcgtccatctccatggcctgagcctccagcctcatcttctgctgcagggaggtctcccggagcatccgaacctcctcctccagccgtcgtaactcttggagctgccgggagatcagctccgcctgctggctcagggcaccggagaccctcagctccagagaccttcaaagacaggtgggcacgggtgagacctgtccccggtaccaccgggagggtggagacagcaaagagaatagtaaccctcgactttatgtggggaagcaggggctaaggctgaggcaggaggatctccacattcacaccatcacctatcaagtccctactaaatatgagatccactttctgggctcagggaaccaacctaaaccaacctaaatccctccagagatccattcgtaagcagacagattaaacatcaaacctgcacgtgggcagaacacattcccagtgcgagggtcagaagaatgtgcagagctggatttccagtttaggacagctaagcggcagggactgatcttttggtaccaagtgttaactacagacttcttggttgtttcatttgagacagggtcccctgtcgcccaggctgaccttaaacatagtacactgcagaggctgtcctggggctcgggacactgctgcctttactgctccatctgtgcacccacacacaaattacacaaacataacaaaacctaaagtcacggggttggggagctggctcagaggttaagagcactggctgttcttccagaggaccagggttcaattcccagtacccacatggtggctcacaaccgtctgtgactccagtcccaggggatcaagcaccctcacctagacatgcatgtgtaaaaataaagtcactcaagtttgctgctggtcggtctcttcagcttctcttcctgggacctctcaggtgtcagaggtggccttccctcaccctgcactacaccagtgcacctgtggccttccctcaccctatacaacatcagcgcacctgtggccttccctaaccctatacaacccccccaggctcttggtgagtgttcaccacactgtccggggagcctgaggacgctccatccacaaatgactcagtcatgcatatctaaactagtttgtgtggaggctcctgtggtatcataggatctcatgtgactggaggctcgtgaaatgacttgccacagttccctatgatctgtctcctaacgtcctgtcccccttcttcatcatgctttcttccttggcaagtggcaaagcaacactccggtatactgggagaggcacacatgaaacaacatgagtaagactccttactctcacacacagacacggctcagtggttgagagagcttgctgctcctgcagagaaccccagttcagctcccagcacccacattcaatggctcacagtgcctgtcactccagtgccagggaatcctacaccctctttcggcctccaggtgggcatgctcacatgcagatacatgcacataaataaaaatacaatcttttttgttttgttttgtttttttccccagacaggattctctctatgtagccctggctgtcagggaattcactctgtagaccagggagggagtggccttgaactcagatctgcctgcttgtctgcctctctgggattaaaggcaggccatgcccggctcaaaaataaaatcttaaaccacatatgccgagcatagccagctccagtggtgtatgccgggaaaggcccttttaactaagagccagcatgtcacttcgtttcacaatggcttctgggcaatccatctcctccctcagacatttacactccttctttattgttaactatatgtttttacttgataactgtttttgttatatataattttactatgttaaagtaaaagtaaacccttctttttatttagacagaaaagaggagatgatgggggatgcccttcagtatatatgtttcttttattggttgatgaataaaacactgtttggccaaaagaggcaggaagataggtggggcagggagacagggagaaccctgggagagatgcagggaggagatgccatgtagctgccaaaggagtaacaggtctgggcattttctggtaagccaagaccacgtggaaatacatagatttatagaagtgggttaatgatgaagagagagctagccaccaagaagccctagccattggccaactgttttataactaatatagtgtctgtgtgtttatttggggctgaagcggtggcaggacctggaggaaaagaaactctagcaacacttgttaattgggaatttaagtccagagcgcgcgctctctctctctctctctcctctctcttgattttctccagggcataatggtatatgcagtgtaggtaccaacaatggcctacagaaaaccacacaagttatggaacccagggctgctgaaataaaggaatgtgtgtataaaggatcattagcaagtctgagaaaaaggtgattgacagatccctacctgcctctctgccctggcccctgcccatctccatagacatcctgttccctcatggtcactgtgggcctctgagagtccagctgccgcctctctaggacatcttggtcaaatgtggattggaactggggaatgtctgaagcccaggtcggggccattctcggccgagcttggaagtgggagggaggaaccagtccagcaaaacctgagggggtgggtcacaagagtaaagactggcagcttctcagagagagagaggaagacggagggagggagggagggaggaggagagggagggagagagggagaaagacagaggcagagagacacagagagacttcccagcctccttgattggccttactgacctgagggagacaacatctccactctatctgaagcctctcgatcttgtccgcaagagtgtaggttcccctggacagtaggagaaacaaggagactccagttcagttttcaggccaccttccaaagaggaagtcctataataacaaagccacaatccttcagttactgacagatctgcccagctctgagcttctctctccctacttccctaacaaggcagacttgcttgtcccgaacacacgctcctgacaaaggaaccaggcaacaatcatggggtaaatgtaccgagatgggggccaggggatgctcttggggattttgcttctactacaggattgtgagtggtgcctttaccttcctccttaagtgtctacgatccctgtagctctggtctggaggtgagcgggcctgttgtgaaccccgtctccacagttctcgccatggtatggtagggacgttgggaaacccatctaggcaccaccgcgccatgatttctgggtcatttcctacaaaagcgttagcccaaggcctggcaccagaagaatggggcctcatgtagggttaagcggcttccctaggatccccagggaatgcaagcagcctggagcgcgttgccaggcagccagcttcctgttatctcatcggagtctccctgcagcgggcctcagtttctctctatcccctctgcttccattcccgaagcccttcgctgctcagagtcctgcagcatcttctttgtccaactcccgtccgaactcaaattttttgtttgtttgtttgttttccactcacagagatccctnnnnnnnnnnnnnnnnnnnnnnnnnncgcttctcttcctagtcctactctgcatttttcttgacgttatggtcccggtcgctcgctgtcctcaggtctgccctctcctctcctgcacacacccacgggctcatccccctcactaggaccctgagctgtaaggctgccccgacctcctcatctgttctttcaccgggctcctgcacccctcctgccctgtggaccccctccaccctcctgagcaccccctctcaggcccctttccgcccccaaccaaccgactccggccgaacgctccttacccagcgcgaggtccgccttcttgccacgccccttagcccctggcttccccgctaggcttcccgccctgagcacgcatgcgcgcggcgggtgggggggcacagggtgtggagtccttcttcggggcaccccgcaagcgcaagaggagagggtgagctccaccttgttgcagagttagggacctgtctgcgccgccctttgtgggtgacagcggattcccttccctcggggcaggacagaaggggtgctctacctggattaggaagtttgacctgtaggcttccctcccggctcctgcttacactcgaggggacacgttcgtgtcgcacgcacgtccgtgtagcgggacctcctcaccccgctggggtgtccccagctgccgcttaaagtagctttgccttgaacagattgctacagcctccccggatattctgcggcctgaggacccggcatcacggaggtcccacaggacgtcttcctggttttgcatcgcgaaagggcttctccggaattgcttttgaagtctcatcttgacagccgctagctacagcggttgcatgcgtgtccaggcctctggcgctcttggaaatctgtgtttctcaagttggcattacccacagtggggctgctgacgtcagacaactgaaccgaagcccccggtgcatggcctgggagtaggagaggtgatgaactgctgagaagcggtgcagaggggagcacccccccatgctgccctgcttccagctgctgcgcatagggggcggcaggggcggtgatctctacaccttccaccccccgtccaggtcaggctgcacctatcggttgggctgcagggctgacctgtgtgatgtggccctgcggccccagcaggagccgggcctcatctctggggtccatgcattgctgcacgctgagctccaaggggacgactggcgggtcagcctggaggaccacagcagtcaaggtaagcggtgagcaggcagccccaggatggcatgagtaggggagcctctgggactccatacctgcctcccagagtccctgtcaatctctggtagagcagacaagcaggatccggtttgatctgcccatgagagctgtgcaggactaacctgcccggctgctttagctcacacagggctaggagggaggcgctggggtgtcatcagtaaagtggacattctagcactatgctcacacttgactcaagtgtccagggttgctgaacctccttgttcccattaaggcggtgttctagtgacctaggcattccttcccagctcaaggcagcctcagaagcctggcatccacagttcttccatccagttgctactaggtcagacacaagctctggagaagcctaatctgaggtgttttataacagccagcaggagcataccgttgtgggacaggccctgtagcgttacatgaagatggcgctgacaccgtttacagtcaaagagaatgagagcaggagggaagtttggcggtgtgtgtacactgtgatctcagcacttcagaggctgaggcaggaggttggctcctgagttccgggccaatctaggtgacagattgaaactctgtcccaaaaggaaaagaaagagtggaggtgtttagcggtagggtctgctcaagcaggatccagagccggtagcggtggcggctcaggtttttaatcccagcacttgggaggcagaggcaggtggctctcagagttcagggccagcctggtttacagagagttccaggacagccagggctattacacagaaaccaaaccaaaagaagaaaaaagcaggagcatagtgaggaaacttcccatttgtgaggcctcaagtttattgtccctgtcctggccccaccctgaaaaacaaatggccagctcatggtacctctcaccagacatttgtttctattgtcatttgtcttgtgccttaccatcaacagggactttggtcaataatgtccgactccccagaggccacaggctagagttgagcgatggtgaccttctgacctttggccctgaagggcaagcaggaaccagctcctcggaattctacttcatgttccaacaagtccgggtcaaacctcaggactttgcagccatcaccgtccctcgatctaggggagaagctgggactggcttccagcctatggtgccctcccagggggcaccccagcggcctctcagcaccctctcctctgcccccaaggccacactgatccttaactccatcggcagcctcagcaagctgcagcctcagcccctcaccttctcccggggtggtggcagaccacagagcctggctgttcctacgcagcctggagaagtgggagcctcaccacctgctccacccacgagaaaccggaggaaatcagttcacagagtgttggcagagctggatgatgagaacgagacttccctgagccctctgtcagtcctcatggagcccaggaagaagctccgcctggagaaagctgccttggtgtccagtgggtaagttgagtcctcagtgttaatctgtcagtaccttacacccgagactcctttttatagcctgagaccggagtcttcaaggcagggatgagcagtacagatgaactctgggttagctttcacccataaactcagaagctagttgtgtgagcttggaagagtaatggttagaactagaccaaagcaaaacaaaacaaaaaaacaaaaatatccaggctagagagatggctcagcagttaagagcactggctgctcttgcagagaacctggcttcaattctcaggacctactacagttctaaaggatgcaatgtcctcttctgacctctgtggccaccaagcacatacaagctaacaaaatactcatacacataaaaataaaatacaggcctggcattgggggcgcacgcctttaatcccagcacttgggaggcagaggcaggcggatctctgtgagttcgaggccaccctggtctccagagtgagtgccaggacaggctccaaagctacagagaaaccctgtcttgaaaaaccagtaaacaaacaaaaccaaacctggggtaggtggcggcgcaggagtgtctcactgggacattacttggcatgcacctgacttgcccagagttggagtcacagttgtgtaaataaaacagttaattcctcagtacttgatagttgaggtggaagacaagatttccaagcatgggaccaacttgacccatactagagtaagcaggttagttacccagaggcaaggttgtcaaattactcaggagcacccccgctgtagatgagtggggagccctgtgtagccccttgctgctacccacttcaagacagtagcctgggtttgcccgtgatggcgcctggtacatgacctgcaatggctgtagcatccaggccatacaggatgacatgtgggctttccaggccaggaaacacagatatggttctgggccagagtaaggagaacttaggggctagagtgatggctcttgtagatgacttatgttcagcttactccagtcccgtgggatctaatgtctcctggccaccaggcacacaaatacacatacttacatacaggcaaaacactataatttttttaaagaaaagaatggatgctaagaaatgtctcctttctccaaaggagggattaaccacattgctacagactgactaaaggctggggaaccctcacggctgatgtgacaaaagagagagatggtttcctgctaaggatgttgctgccttcaagttaccagtgagctggaatgcccagtaacaaggaatctagccctgttcccatggacgcctgagtatctgcagctagagcaatcatcgcagaaaccacccgcagacttccttatgtcatggctagcgctgtctgagtctctgagtggctttccatagccttgcctttataacaaaataaactgcttcatccacataggggtagcattcttatgagtctaagcccgctttcgaaatgatgggaagcctagacttggtatagtctgcagatggaattccccacagcagaagcacctgtgggaaccacatggccaaggaataagatggctgtgagtgtgaaagcaattgctgccaagcctgatcacccacactgttgaaggagagaatgaatgttcacaagtcgtcctcatgctatggcactcactcaagtagtcacacatatataagttttgtggttttggggaggcagaggggatttttgagacagggtttctctgtggctttggagcttgtcctggaactagctcttgtagaccaaactaggattaaaggcatgcgccaccacccagttacatacagttttaaagttgagtatggtgtgtgtgggggggggtggggagttgtctggagagatggctcagaggttaagagcactggctgctcttccagaggtcctgagttcaattcccagcacccacatggtggctcacaaccatgtaatgagatctggtgccctcttctggcccgtaggcatacatgcaggcagaacactatacataaacaactctttttttgtttgacaaggtcttttttttttaatttgcttatttttattacatatacagtgttctgtttgcatattttgcctacacaccagaagagggcaccagatctcattacagatggttgtgagcccaccatgtggtttctgggaaccgaactcaggacctctggaagagcagccagtgctcttaacccgagccatctctccagcccctgtacataagtaactcttactactatgtgttcctggccagcttgatctacacaagatcctgtcttcaataagaaacaccacaaagggtagatttctggtaaggccgacatagaacaaaaataagtcttcaagactgggtttttagttggaagagatggctcagcagttagttaagagcgatggatagcatttaatcccaacactgtaaaggtagaggccatcctggtctacagagttgcagggtagccagactacacgagagaaaccttgtctacagggacgaaagcatcagctgttcctgtaagaggaaccaggtttggttcccagaacccacatggctgctcacaacttacaaactacagctccgggggattcaataccctcttctgtcactttacacacggtgcacatacatacatatatacatacatacatacatacatacatacatacatacataccaaagaaaaattggaattttaaaaaacaatttggggctggagagatggctcagtgattaagagctcttccagaggtcctgagttcaattcccagcaaccacatagtggctcacaaccacctgtaatgagatctggtgccctcttgtggcctgcagggatacataataaataaaaacaaacaaaaaaaacccaagccgggcacatgcctttaatctcagcactcaggaggcagaagcaggcggttctcagtgagttcgagaccagcttagtctacaagagctagttccaggacagcctccaaagccacaaagaaaccctgtcccaaaaaaacaaaacaaaacaaaaatctaggccaggcagtggtggcacaagagtcaggtgaatgtctgagttagagcacagcctggcctacaaatcgagctccaggacagccagggctgttacacatagaaaccctgtcttgaaaaataaaacaaatcagtttagctggcatggtgagacccgcctttaatcttagcactccggagggcagcagtaagcaacactcaaggccaaccagtgagttccaatccagaacaaccagggctacacagggaaaacactgttcaaagactttgtttgttttagtttaagcccactaggacctcgagaatagcatggtgactgagggatattaaatgactattccatccgctggcagagatacgatcaatctaaaacctcagcaagtatgtaatgtcttcctctataggttgaattccaacccaagtattcctttggcattttgtaacctccaacagtttgaatggcagttctgtttgaggactgcctgggtatgaggatccattactgggtctctctatccccaggctctctagtaactaagggaagacactaattaaagtttagtgatctaatatggctcaggctttattgtttaaaaacaaaatgatgactgacagactcataatcaacagcatcactgaacttctgtctccctctactgtattctgtgctttcgatcccctcgggaaaggaacttaaccccaaagctgtgatggttccaggttctctacctcatttcccttgcctcagctcacctcatcatccccaggcagggctggtgcctcagtttgaatgcatgggagagcccagagcagtgatgggaacagaggttaaggcctcaccctcaggaaaagggacagcagggtagaaagtggtgaagtgggggctcccatagcttggggcaccaaaatggggccctgggggcagagggaaagatacaggcccccctgggaaaggagacccggcagcttcatactcttctcgttgggtatagtcggtacttgatcgtttgcccttctggcgccggttacagaaccacactcggaccacctaggtatagaagactgacgttagctcagggatgctggagccagaagtgaggaggtgtaccacaggtcaggatctgggtaccacggaacagggtctgggtacccacatccttctccaacccaagctgatcggcgatggcactgatctgctgcagactgggctttgggcactgtaaaaacatgttctccaggttcccccgcacacggttctcaatgctcgtccgctttctctttcgagcctgcaccagggtctcggctttgcatatctgggcaggggagagaggttgacagggcaagtttaggatttggctggtcaacacagctcctcgttggtgtgtgacttgggagcaaattgctaagggagtgaatgttgactgcatgtggcccccaacacaaagttccattgggcttggactgcttgcctgggatgagagtgacccacgaaagaaggaacctgattggcaaatgttaaagccctgggttccaatcctcggcgctagaaggggaaaaaccaacaacaagacacaggatcgctgcctctagtgggagagggagactcaagggaggattggaagcagcaggcaggattgtaccacagggaaggcaatgtgcatgcgatatagctcacctcctgaaggttctcgttgttgtcggcttcctccacccacttctccagcagggggcgcagcttgcacatgttcttgaaactgagctgcagagcctcgaagcggcagatggtagtctggctgaacacctttcctgggaaccaatcaaagggaaagtgaggtagcatcatggcccccttctcctcaatgtctagtcctctccctctacacaagtgagggagaggtaacgcctaaaacgctcgccccttgcacctacactgagagctgtgacagctgtggggtcgaacgtactaaggggaaacccaccgaagagaacgcccagggtaagccccacgtcggcctgggtgtaccccaaggtgatcctcttctgcttcagaagcttggcaaactgttccagttccttctgcaaggccttcacatcctgggactgcagtgagaaacaggacttaggttgagagtcatactgtgagcggtcagtctccgccactgggacccagggggttggtctgtgaaaagatctcagcatcccagactgcccactaaaaatggtctgcttatgtaaataccattcactcttggtccctaggtgccagggaccgcttttcccccatgcaactggccacattcgagacccagagttccaggcatggcatcacttgtctagtatcccaggcaaattcccatctgctaactaattacccaaaacagccccattggcaaaatgtcattatcctagttttcagtaagtcttaagtctacagaaatagccagggactgtagagcaagcatgcaatcccagcactccaggggcaggcaggactatacagatagtctcctagctcagaacaggggcctagagaaaataaacatcaccaggtccattggattctaaacctataccttcccccagcttgaagttcctaaactataacaaagcacaagtggggatattgaaccagggactcgtgcactgcctcggtctctcaagccctgggttaataggatcccccacactctgtttggctcctttagaaacccacacaccacagagtagacaaatgccccggtctcatgagctgacattccagtgaggagaaatgggagtgctgtggagaaaaccaagagggcaggatagtgggttgtataagtgaccatttgaattaatatggtagtcagcgagtcaaatgagccttggaagctgagtgagatgtcaccaaacaaaatctgactcacatcctaaagtatggatttggtgctagccagacaaacttgagtttgatccccccatgcccacaggtgcacagtggcaaacaacaaatgtttggtttatcttttaaagttaaggcctggaggtggtggcacatgcctttgatcccagcccttgagacgcagaggcaggcggatatttgtgagtttgaggccagcctggtatacagagtgagttacaggacagccacagctacacagagaaaccctgtcttggaaaacaaacaaacaaaaataaataaatagtaagcaaggctatggcagacagtggtagttaggaccgggtggagaaggcagaatggatggcctgttcacccacgtatgagtggacgaaacaaatatggcgggagacatttcaggctctaacagaagatgaaaagagaggcagttgtttggtggtgtaagtgagcattgacgtaggagaggggcaggagcaggttggcagagcaaaggttcaggactgagagagaggtctatcttagaagctcctgttaagtctggccaaccagaggacagacaggagcagcagccatcgaggaactccccaacgcagttccgaatccgtccggaaggtgtttcaatgggaagagattttatcagcttcaaacagactgatttcaactccaacagctcctcaaaaagaccaagtgcccccagcttttctaaatcctattttgtggatttggaattagttaaactacagttacttgcttcattaaggccacttaggacatgagataaactactaatgccgtcctaggggactaccgatagctaaaaagatgcgagataatacataagcagacacttggtgggggggacgcccaattcactaattactaagaggtaggggctactggccggcattggcggccgctcacgcctcctcctctagatgcctaattgcttacactggcttcccagtgctgctgggcatctgtggcagcccttccagggccggctggaggctatcaggccatcagcaaagccagtgcactcacagaaaggtctagaaatggcctggagacaactcctacctgagtgtgtctgtttcttgtttacagcttaaggaagtcaggccgaaatggaccagatctgcagctccagctctctacactttgtgtaaaagggttactaacacatgggtccgaggcacaaggtgaggacggacaggctgtaaacttgactggagacgaacccaacccaacagcatccagagttcctatcagtaaccagtcacacccaagcttctgagttaacaataactccagggcaggcagcgctttcaccctccagccatgcttaaccctaaagccaaagtcctgggtctgacagggatccaagtccccagaagggctaagtgcggtcgaggaccagttgaatcccaccaacactgctgctcagtcaggcccagaaatcgaccagccgacatgacaagagccggccttaacaatcaaggccagttcccggttcctgcaattctggcttctagttcaaaccctgccctgcttctcaggaacaggcagcaaccacaaccccttctttggtaggaaggttgtactgcaggctcccaatcgccttcgctgatgcctctgccagtgcagccatgtcccccccccccccacccacctacctcctcgggactcggttccaccttctccaacttcacggggacaatgggcctggcagtacagggcccaggggaggactcctccgagtcgttctccactcctgctcctgactggccctcaggctgtgaagtctccaggccaactggcggcactagacccagtccaacctgaggtccacagtatgccacccctccacagaactcgtatggtgggggacaaggggaaatccccagcacttctgagcctggtccaacccctggcccgattccaggcccacctggtggcccttggaagcttagccaggtccgagggtccacccagccaggctccagccctcctgacccatcacccccaccaggtggaggtgagaaggcaaagtctgaagccaggtgtccagccatggggaaggcgggcaccccaagcccgggggcctgaccaaaggagggctcacctagggactgttaaaacctctctccctccctccctccccaatcccaccctctagccttgacctctggccccgccccctggatgggtggaggagtaggcaatgggggtgggagaaactgaggcgaaagatgtttgcctgtgtctggaaacggaaggctgcggacaccctgaaggagcaaccttcagggcaggaccccagggggccttcattttccactcaccatgtctactcacacctacgatgggcccccaacacctcagagccgcccaggatcccttccacttctccacattcctcagggagcaagtgcttgtctccccatcccaccacaaagcctcttggtactacccccccccgtcactgcagccacccacatttatcgaatgccacgtcccaagcatttctggggtcacctcggttctttcgcttacgcaagggcactgcccgcccagccgctcaccgcacccatctagaattctaggttctagataccgctgtccaccctatctctggggacaggctggcgggcggaaggacgagggaggctgacactccatactcagtcctccagaccttagaggctcctcaccacgggactcccaggcccaaccccatacgtccccagagaggtactggctggttctgaattctcagcgtacattttccaacccaaatgacaagccaatccgggatccccccccacacacacacccgttgtaagacctgcactcaggcccacagttccctcacagtcaaagcctaggcttctccttcctcaaagaggctcagtcctccctcccccaccccccagcccaggcctccagcctagttcctgggtggagaagcccaaagggtggtaggtgtgtagaggaaaaaaaaaaaaaaagacttctggttcaaagaagcctgggagggactggggggaagggtcaggacaatggccttggctggacaatcctggtccccagagggggcagctctaaccctaaacaagtgctcaacccttgaatgggcctggatggctcccctggggacaacttcctgctccccaacccccccagccccagtcccctcacacaaggtttccctcagagctctctctctccaatccctcaaagactgagcctcagagctcatctcggtacccgacttcctttcctcttggggactctggtgttcagcctcccctcccccagtcccccaggccgaggatacctttgtttcggggtctcggctatctgacagatgccaagggatgggattaggaggaggggtgcaggacgcctacctttagctttgctagagggattttctgggcctggtctgagaaccctccagtatcccgttgctggcctggtgcttcgtttatgtttgcaagagaatagccctcggagtgcctgtctgcaagggatgatgtttgtctgtctgctctgacaccttgccctaaatgaaggccccggggtggatcacacagtccccaaaaggctcccggccaaagcaccccacagtgtagacagccagaccagagttctgagcctgagctctgacctctacttggctactccaggtggagcctcacctggggctgttggctaggatctgtggctctagctgcctttgagggcctgagtgttccttaaggagtcacccgacagtaatcaaaaagcctttgtcatttatttacttatttatattgtttggagatggaacactactccatattttcaggctgattacagcatgagcaattacctaacccaattctctgagacttttaaataaaattacattttgtgtgtgtgtgtgtgtgtgtgtgtgtgtgtgtgtgtgtgtgtgtgtgtaggtcccctctttccaccttgtcagtccagatggtcttgcttggtggtggctgagccttcaccatctctctggccttccttctgagccctacacttcttcctcatcctcctagttctatacatgaattgcagtactttttccataggttagtttgaagatctgcagacagcaaggctggagctacattcacaaggcagcctcgaactgccctggtaggcagattaaggaagggtaggacaagaggcgcccctcccaacccatcttctctgcccgcaggacagagccatcacacatctttgtcatgcatttacctgccgtctgccctgaagactcagcctccggggggaagggcaggagcaggctagactcccccacacccagcttctccacctgccagcctgaaagtttcctctacaacaggcccagtaacgacctcccctgctacacctgttttcccagtggcccatctggactcaacaccaaacttattctgtggattataacgtgtggttgctctaggtggtgacacatggtcagggcaagaggtacattctgagtgcttggctgcttagtgactggctggctatctgagccaggctggccctaagcattcctggcatctaatgcagaccttaacagcaagttaagtttgtctgaagtcccagtaagtcttctcagaactgacctgaagctgaggctctccctggcctggtcccatgctgtcaacccattggccctggagatcagaaggctggtgactaatctgaccctaaccctaacccttgcctcttgggtcttgggaaatcatcataatatattgtcttgttttgagacaaggtctccctacatcaccataatatcttaaatccctcaaatctgagccaaaatttattaactctccttgtataccatattttaggatcaagtcaggacctgtctagagagaagcccacacttttgcagccaggagcagctcaccaacgtggcaaggaggtataatgggagccagatattattcacacctgtaatccaagccttgggagtcagaggcaataagaccataagtcccaggccaggggctggagaaacagttcagctttaagagtgtatactgctcttcctgagacctttttgaattctgttcccagcacccacattggggggcttataacctataattccagctctaggggacccaagtctctcacttccctgggcatctgactgcagatgcccacatccacacatggacacacacatatagacacatttttttttttttttttccctcggaaactaggtttctctgtaggccttgctgtcctggaactcattctgtagaccaggctggccttgaacccacagagatttgcctgcctctgcttccctattgctggaaatgaaggtaccatcacttcctggtctgattttgtttgtttgtttgtttgtttgagagtgtaaggccaatcttcagaagtttccaggccagcttgagccaccacaggagaccttgtctaaaactaaataaacaaaggctttgatgggaaagctttggtgtgagcctggctctgctgtgagccccgccagtcctcactgggtttgaggtgtgatggaaaaccagctaaatggactcatatgaaggataactagactagagctggggaaccacttattttagcttctaggttctgtctctctatgaagcaaaaggaagaggagaaatggggagctgtggagaagtgggttcagtcagacctggcccagccagaaaatagtttcccttgatcattttacagggcttcccctgtggatctgcagccaccccctccaactgacctgctggccgcaacttctcttcccaaatccacatgttctgactgggttggcaggtgagagcaaggagtgggaatcgggaagaagccagagttgtccacactggcttggattccttgccttggttttttgtgcctaaccaaaaagacctgagggaggctgaagcgaatcttggagatggctcagtgagcagtggtattctctgagcctaacaacctggatttgatccccgggggccataagatagaagcatgttgtcctctggcctccagaggcatgctatagcatggaggcatgctataacaattgggtacgcgcgcgcgcacacacacacacacacacacacacacacacacacacacgcacacacacgcacacactgcaataaaaatttaaagatctagaaggtaaatgtgtaggtcagtagcaggaagatcaccacttgggaatgcatgtgccagagttcctgagctcatttcctagcagaactacaaaaaagaaaaggaaaaaaaaaaaaaagggaggaagagaagaataaaaaatccacttggaataaatgaattctagatttcctttccttattctgaaacagggttacagacaatagaggctgcccctgaactctatgtagccaagaaggaccctgagttcctgatctgcctagcttcccagttctagtgagcatagtaaaaaaataaaataaaaaggcacccactagaccaaggctgcaccagagcccagtgacatcctcattcaagacaaccagcccctcaatctgctttgcagctggagagtctcccccaggatcctgtacctgaagtcagagacactgctagagcctggacctgaccttcagcaagcagcctgggacacagagggttaggactgcagttaggaacaacatagagtgtgaaccttgtgtgatggccctcagcataataaaataccacttttttaatactaaccatgaatatctaccttcttgctggcaacaccagtgctaggattacaagtgtgtgtgtgtgtgtgtgtgtgtgtgtgttcactactatgcctggcctaactcaccattttcttccaacttagaaaaaaaattgctgtcccattcccacacccccccattctcaatggaaagttcctctctctccctctcccttccactcctcctcctcctccctctccccctctctctctcctctcaaatagggtttcaccgtgtagccctgactggcctagaactcaccttgtataccaggctggactccactgcctgggattaaaggtgtgtgccatgcccaacccaagttttgagattcttgaaataggagaatctttggaagagccagattgaatcagagtcagtttgttgatgggaggtcagactgatgtactcagagagtcagtttcaggctttaggagcagagtacacccatgagctacagcctgtgacccaactagagctcctggacttatactggctaaagaggtgattacaactgcggccaaggaagaaaaagaaaactataaaacttttatcacagttaggtgtggtggcgcacgccgcagaggcaggtagatctctgagttcaaggccagcctcgtctacagaggaagttccaggatagccagggctacaaagagaaactctgtcttgaaaaaccagaataaattaataaaattttttgtttgtttgtttgtttgttgagacagggtttctctgtgtagctttggagcctatcctggtactcattctggagaccaggctggcctcgaactcacagagatccgcctgcctctgcctccccagtgctgggattaaaggtgttcaccaccaatgcccggctaataaaatatttttaattaaatttttgtagcgtgtgtaaacagaggaggccaactttaggcagtactctgtcttcttccatcaagtgggcactgggaattgaactcctggttgtcagatttggcaataagagtccctacctaccatgcccagaggctgaaagggaggtcctgtggctgacctagggccctactctctgtgcccttccaaagtgccctcagcatgcatgtccaccttccctttcagggttcccaccagggtttctagagaggattttccactctgggtcacaacagcatctcctcctgtcctccccttccctgtagctctctgcttgtttctaattcagaagacgctgtggtgctgagaagggtgtcctgcagttataatttacgggatggtttaccccggctctcggctttcctggtggctcacagaccaccctggtctggagggtgtgtgactctgtcacaaaaaagccaggccatagctcttcccactcctccaaatacctggaattcccttctccactgacagacatggcactcagtctcccagatacagcctctctgtcacaccggtgctcagacaaggaaccacgccatactccaccctgtgtcccctacagccagtggctccctcctgcatcacagctgaacctccttccttcaaaccaccctcacccaggagagggagataatagcccatctccccaagggaagatcaagtgaagcttgtttagagaccttggtgcttacactctctgatcgccacccccaacccccaaaagggtctcactttctatatagaccaggctgatctaaaactctgcctctgagagagatcttcttgcttctgcctttgagagctgagacctcagtcatgtgctctcatgcccaggcctgtgcagatttcctgagttcttttttttttcttaaatatttattcattatgtatacagtgttctagctgcctacatgcttgcgtgccagaagaaggcatcggatctcattgcagatggttgtgagccgctatgtggttcctgggaattggactcaggacctctggaagaacagggaatgctctcaacctctgagccatctctccagcccgattttcctgagttctaactgaaggagtgtacttccacccacccccacccccagcttatgttatcttcgcttttgctctcaaactccaaaagagatgtccccgagtttcattctggcagggggtagggatggggtaaaactgaatcagacaggctggggtatagctcactggagagtgtttgcctaggatgcagaaggccatgggtagatcttatccccatcccacccccaccacacaagattaaaagggacaatccatgacattgtatgggagtgtggctcactggtagaacacatgccaaacacacacagggctccaggttcagttcccaggatttcatagaaaacaacaaaaacccgtacaagtgagaacttaagggctgggctggagagatggctcagctgttaagaggagtagctgctcttgcagaggaaccaggttcaatgcccagcacccacataccagcttacaactgtctgtgactcgtttcagagtttcttttgtcccacagggtcacacacatataggttgtaaaagcgtgcctgcacacacacatacggcacagggacgcatgtgtgaacacacaaacagaaataaataaataacttaaatagcacttgttgctcttagagaagacctggattcagttcccagcacccacattgtgactcataaccatctgtaacttcagttccaagggatccagtgcccccttctgacctctgaagggaacaagcatgcatacaatatcatacaatatacatatgatgtacatacatgcacgcaaagcactcatacacataacataaaataaataaatccaaaataacaataataatagaaaataatttaagccaggcagtgatggctcacgcctttaatcccagcactggagaggcagaggcagggggatctatgtgagttccttcgaggccagcctggtctatatgctaaaatataagccaggtgtggtagcacatggctgtcatcccagtactggggagactgaggcaggatctcatcttaaggccaagctggcctgcatagcaaaattctgtctcccaaacagtgaagtaaattgtgaggactagctgctgctgctgggaggtgcacagagcatctagtagacccggggttaacagctgattggaaacaaggttatgtgtgctagaataaactttgcttaggaccctggaggagggacagggtactccaggaagaaagctgttgctcctgggtttggaaaggctggattggatttcttttcccctatagggaaagctaaaggggaggaagagaggtggtcttatgctcacatcctacccttttcctgtatccacatccagaccattgtcaatgctggggagtaactagggaaatcaggaatgaaatcctcaggcagaagaatgtatcccaggatctcaggaagtgtggagcccagagcctagcactggacccagcactgaagcagaacagatcctatacagagggtaataaaaacagatccacatatttgggatgttttttattttgcttttatgtttgtgaggggattaatttttatttttattttttttggtttttcaagacagggtttctctgtgtatctctggctgtcttggaactccctctgttgaccaggctggcctggaactcatagagatccatctgcctctgcctctgcctctgcctcccaagtgctgggattaaaggcatggaccaccaccacccggctatgagggtgttaattttcaaatttttttttttaaagattttatttattatgtatatagtcttctgcctgcatgccagcagatctcattcaaggtggttgtgagccaccatgtggttgctgggaattgaactcaggacctctggaagaacagtcagtgctcttaaccgctgagccatctctccagccccaattttcaaatttttttaatttttgagattatagtataatcacatcatttcccccttctatttcttccttccaaatcctcctaggtaacccttcctgctctctttcaaattcagggcctcttattttcagtaactgtcactaagtatgtatacatacatacctatatattcttttttttttttttttttttggttttttgagacagggtttttctgtnnnnnnnnnnnnnnnnnnnnnnnnnnnnnnnnnnnnnnnnnnnnnnnnnnnnnnnnnnnnnnnnnnnnnnnnnnnnnnnnnnnnnnnnnnntgcctcccaagttctgggattaaaggagtgcgccaccaccacccggctaatacctatatcttcttaaatgtaactgctcagtctgtatattgttaattgtttctatgttttcggagctgaccagttggtattggatgaccaattggagaaacagtcttccccaggaattcctgagttgctgtagttctttgtgcagggctgaggcctcctggctttcccagccactcccccatgtctattgtctccccgatcagctcatgtttagtcttctttctgagactttatgacatccctagaagacacagtctcacagccaactctcatcctctcaccatcttcccacctctcttttgcaatgtttcctgagccttgggtgtgggaggtgttttgtagaggtgtcagctggggctgggtttggcaactcagtgtttctattggctgtggctttcctactgtggccctctatcccttgcaaaaggaagctgccttggtgaggggcgagaactacactaatctgtaggtgtaaggacaaatgtttaagaggcagttaggggctatgctgacttagtaaagagacagttgcagattctcctccaagatctgtgacttgactagcttgggtagttagctaggtctccaggaccaggcatgacttccctcttgttgagtgggtctgaggcccaagagagctgttgttcaccaccaaggtatgtgctccattactgcactcttagggtcctatgccggctctggtttgtaggcatcatagctgaactgtaggtttcggctagccctcaggggagagtgttaagagctcaggggctgggccctatccaggcagttgtggcacacagcacagctttaatcccagcactccagaggcagagatgggtggatgtctatgagtttgaagccaatctgagtttgaggacagcctggtctatctacagagccagttccagcacaggctccaaaactacagagtaacccatcgagccgtcagtgcttcccacttcccttaataagaatcagtttcaaggcttggctcctgtggagacctgcatctgcctaggatttactaaaacaaccagatagatgtctctcacctcatgctagtagtgagtacctctggcaattaaaacttctaagccaggggctggaaagctggcttagtggttaatagcacttactgctccctccaagaggacccaggttccgttcccagcacccacatagcaagcagctccgagccatctgtaatgttagtcccggggatctgttgccttctagccaacctccttgggcactaggcacacataagttgttcatacacacaagcaggcaaaaacaaaacaaaaacaaccaaaaaccaaaacaccccactcatatacataaaattaatagatctaaacttttttaaaaacaaaagctaagaaattttttgtctttttgagacagggctgtcatggaaccctgtctgtagaccagggtggcctcaaattcacagacccacccgcctcctgagaaagtcctggggttaaaagtgtgctccccacctggctaagaaacaaagaactagttgggcagtggtggctcacgcctttaatcccagcactccactaggggggcagaagcaggtggatctttgtgagttggaggccagcctagttgcagagagagttccaggccaggctccaaagctacagagaaacccgctctcggggcgggggcggggggtgtggggtgtgtgtggggggagaaaaataaaaaaaccttctaagctgtttttgcttgtcttctaggagacttctaggagagcatggctgattcaacctcccttcgtaagtctgagagtgcgacagagggggctctactgatggagactgcacctttactcctctctcttccacgttttcagagccccactttccggcttcctgttgcctggagagccctctgctggcagcatcttcaacaacctttctcaaacctgtttgcatccaaggcataatccatcccttcgctcgggaaggaatcccaagctgctacacagtgggctgccgcagcatctagagctttttatggatctgctcaacacttctacaaaaggaggcagcccctaagatcagggctcattcatcctcttgccccgtagacaagaaagtcagtgccatagactgtttgctttctctctgacccgtcaagatgggctagtgtcgtggtctcctccatactgccaggaagctcggcagtcaccgaagggaccagaagtggcatgataaacaatacaagaaagcccacttgggcacagccctgaaggccaatcctttcggaggtgcctctcatgcaaagggaattatgctgggaaaggtaggggttgaagccaaacagccaaattctgctctccggaagtgtgtcaggctgcagctcatcaagaacctcgagaagatcacagttttcgtgaccaataatggctgcctgaacttcactgaggaaaacaatgaagttctggttgctgggtttggttgaaaaggtcatgctgtaggtgatattcctggagtgcgctttaaggttgttaaagtagccaatgtgtcccttttggccccgtacaaaggcaggaaggagaaaccaagatactaaattatgacagtggaaacacagtaataaattttcatattctgaaaaaaaaaaaaaaaaacccaaaaggccaaaaactctgtttatgtctttccaaactgaactgttgggaggagatcacctgtgatcccacgcctgcacacacacacacacacacacacacacacacacacacacacacaccactctggaggctgaggcaggaggatttccaattcttttcttttttccttttcttttttttttttttttcccagacagggtttctctgtattgctttggaggttgtcctggaactctctctgtaggccaggctggccttgaactcacagagatccacttgcctcttcctcccaagtgctgggattaaaggtgtgcaccaccaacgcccagctgaggatttccagttctgggtcagagtggtgacagacctagatcctgctcaaaccaccacaaaccaacaagccaggtgtggtggaactcattgtaactctagcactcagaaggcagagagaggatggagggtcacagcaaaaaagccagcctggtctacaaagtgagctccaggccagccagggccacacagcaagacaccttctcaaacaaagaaaacccatgaaataaagcaagaggcgatgggtggacaaacaacccacttctgagaggcaaccagcttctgaaggaatctgtcttcactctctgggctccagacaagttcacagaaccctataaaaggtacagtgtatgggagggcattgtttcccaaacggcaaggtatctacgccactgagcacatttgaacatttgagttcttaactcattagtgcctcgtgtgtgcatgagtggcgaccaatggcggcaggtgtgtggtgtggtgtggtgtggtttgcctgggcttacgcttcctggagcaagagcagcctcttgcttcaggttgggtctggttcagcctgagccagaactctacaggacttggaaaaggtagaggcagcaaactctgctcacgtgcttccagcaatccctggcttagcttctgccaagagcccggagggttacctgagtgccaggcaccttgcctatctcccctgtacctggtggaagtcttggggaccctgtggcaggggcacagcttccaaaattagggaagttggaggggataaggacagacatgctagtgacccctgtgaagtccatcccaccatcttattctttgagatagggtttcccactaaacacgaaactcccctttttggctaggctcccaggatctgcctgtctctaccctccttgttagccaggcccagcttttttttttttttttcatgaaaatgtttatttccaacaccacctgtttaatataaacacacagaaacgcaaccttaccagagctgggaagtccttctgtataacaaccagttaattaactaatctctttctctctgtctctgtctatctgtctgtctgtctgtctgtctgtctgtctgtctctctctctctcacacacacacacacacacacacacacacagcccaccacagagccaagactataatgcgcacatctccacaacccacacacatctttttttttctcttcttcttcttcttcttcttcttcttcttcttcttcttcttattattattattattattattattattattattaattcaagttagggaacaggcttgtttcacatgtaattgccctctccctcccctcacccccattccttctcccccacccacacacatcttacaaggatctgtgcagttgttccagccaagaaaagagtgactcaggcccaactttcatgtagttgctggggactcaaactcagctcctcctgggttcacagaaacccctctcatccagtgatccatctccttagtttcttgctttcttctgtattcagcctgggatcccaggccatggataacactacccataattaaggtggatcttccctcattaattaacctaatcgagataatcaatcactggtatgcccagaggctggcctaatcaggacaacccctaactggcatgcccacgggctcttctcttaggtaacattagcacctgtcacattgacatcctctctctctctctctctctctctctctctctcaagacagtttcaccatgtagctctgtctggcctggaacctgaaatgtagaccaggctatactcacactcacacagatccacctgtctcttttttgtatgtagagcgccaaggacactaaagacagttatgtgccactaggccagaccatcaatgctaaccagtgggtaagaagtcagcctgagctacactatatgagaccctgtcacaaaaatcataaagaggtactggagagatggatggctcagtggtcaagagcactgtctgtggaccagcgctttccctaatatttgtaactccaaatcaggtgtcagatgcctctggctgaggggagagggaagacctctcacactcaggtgcacacactcacaggcaaatgcacacctacaaataattaaaaataagtcttgcagcgctgtggtggtggcgcacgcctttaatcccagcactctggaggcagaggccagaggatctctgagttcgagtccagcctggtctacacgagcttgttccaggacagcctccaaagccacagannnnnnnnnnnnnnnnnnnnnnnnnnnnnncctccccccccccccccagaagatgtttttggtggattgctggctcaggctggggccagagtattaccacggatagtgagtgtgaggccacacttagtagaaacagttttccagaggccataggtttctttattaccgtcttgcttccaaaagggtcttttccttgcatatttgtcagccacaggtgtcaggccggccatctggggtcataaataaacttcacagactggctgaagcgtcttatctccccctcaggcaggtgactagtcagctacagcttcactggccacaccctggctaaagaccaacannnnnnnnnnnnnnnnnnnnnnnnnnnnnnnnnnnnnnnnnnnnnnnnnnnnnnnnnnnnnnnnnnnnnnnnnnnnnnnnnnnagcaagaattcaagtgtcctggacaacacctggggaccagaattcactccaggagttttccatttcctgaaaagatctttcccatccctcaagaagatgaaagaatttggtctagaggacatttgttgatttttgagacagaatctcagtacttagccctggctgttctggaacttgctctgtgacttgatctcaaactcagagaaactcagatggcctcttcctctaaactgttgggaattaaaaaataaaaatttaaaattgtgttgtagagatggctcagaggttaagagcactggctgctcttccagaggtcctgagttcaattcccagcaaccacctggtagctcacagccatctgtaatgagatctggtgccctcttctggtctgcaggcatacatggaggcagaatgctgtatacataataaataaaatcttttaaaaagatttaaaatttatgtgtatgtgtgtgttggtactacacatacaggttcctgaggaggccataagagggcattggatcccctggaactggaattactggcagttgagaatttcctgtgcaggtgctgggaactgaactcaggtccactgcaagagcagcaggtgtgtcaacctcagtgccatctctccagcccctccttccctctagggcttgggatgcagagcaaagtggagcattacctggagtgggtaaagtactgggttcaatcccctgcaccataaataaataaagaaaataatcccactgaaaaatgaaaactactgattaaaagaatcattttactttttagcaattgcatcactgtggtgaagaacaaaaaaaagggggggggatcaaatcctgctgggagagttgggctcaagaatcccagaacccttcaagcatattgtaatcctagcactcagaggcagagacaggagaatctctgagttcaaggccagcctggtctacagagtgagcaccaggatagtcagggatagacagagaaacctgtctcaaggggtgggggaaagattcccagaatactttgtgtgtctccacttggtgcacttgggcttggggtaagggagagagggagtcaagagagtagatccaagacacggggcttgtgtcttggcccagaggaaggaggggcagggcagggcagggcccctaccagccgcagctagggccttagtatctgggcttcacttctcatccattttgtcctttcttagctttggtgatacagggtctggctcagtgatggtctcctgtcactagcattgtaccttacctatgtcagagtcccttggagggtttgctgcctatggcaccatcataggcccccacccccttgtgtataccccaccagtgcctttaaagaaaccgccttgtccctccagccgccgtgcttgagggtgcctgtgacggggttggggtgcactgcatgacctggcttgtctttctccacctcctcttcttcttggctgtctctaaagaccagcggggcagagggaaagaagcctttctcagcctagtatcagccttgaaaacctactgaacaatttttttttttttaaatcacacattgtcagaaacagtaccccaaaacttgaggtaggtattcaagggctagatgatcttttactgtttcacaggattgtataagtcagaaaccaaagcatgtcagtttttcacaaggagccaggactgctgggggagtttgagtctcggtttgtaaaacctgtttcaagcggtctctccggaggctgaaggagctaagccatcaggaattcccttgtctaggtaccagagataaagaagaaagcccagccccagcccagcccagcttccacccacattgtcaccatcacctgagggcacctgtcttcccggtcacctgtggccactttgttctggttctggctccaggccacattcttttgggaagtcactctcctcaaggtcactcaggctgagccgtggaggtcttcattgtcccctgcctctcagtggcagcttccctttgtttgctcagtttctgtaagctcactgatcacagatcacatggtatcgggaagtagctccacactgaagaaaggaaaagaatggaaggaaaagtgatggaagccaggtgtgcagggccatgtctgaaatccaaggactccaggagcggaggcaggaggaccatgaatatatgaccagcctaggacacagtttgccttcaagccttgtgtgtgtgtgtgtgtgtgtgtgtgtgtgtgtgtgtgtgtgtttaagagaaagagatgttttacctttttatcattattatttattcttctctcatacattatacatcctcaccacaatcaactttttaatcccccccttctttttcaacacagggtttctctgtatagctttgtaggccagtctgccttgaattcacagagatccatctgcctgtctccagagtgctggtataggaggcttacgccaccactgccaggccataaaaaacaaaacaaaacaaaaccccccaacccaaaaaaccaagaatccgaaaaaataaaaagagccatgagcataccatctatcccagcacttaggaaggagaggcaggtgggtttctgtgagttggaggccagcctggtctacagagtgagttctaggacgagtcggactacacagagaaaccctgtcttgaaaaacaaaacaaaacccaaacagaaaaccctaaacaaacagacacatgaaaatcctatccagaatgagtagtactgaatattagcatccctcaggtggagattcttcctactattttttaagttccctcctcctctttgcatcatgatctcttcacacacgggttaaagcggaatgtggagactcacgctaatactctcagcacttgggaagctgaggcaggaggatcaccttggatttgagaacaaccttgaatcacatagtgaaccgggctagcctgggctacaggtgagatcctttctcagaacccactcccttgcaaaataaaagaaaacgcgggagctggagagatggcacagtggttaagagcaccggctgctctcccagaggactggggtttgagtctcagcacccataagcctgttcaccctagttctagggaattccgttctctcttctggcttcccaggggcaccagacacatacggagacaaagcatccataaccgtaaagtaataaagtaaaatttaagaagacataataaagaaacaaattcagtttagcaaaggacaatttgttaaactcacctgcatggccgcaggactgaggcttccgcgagctcagcgcgccctctagtgtcctttaggcttcatcacactgtcggtgggaaacactgcacttgggtacacctggttatgtttgaagccaatcaccaaattttcagcgtcactatggccccttctgctaacgctgtgattttctcgtacccctcaaactatgtcactctatctgagggcgagaggactcccagagcccctctggttacatcgtagccctgacagcgacaatacaaggccaagcagaagcccaccacccagaaacagcgccctgtgcagtgtgtaaagtccctgcctttgtcaaactcttgactccactcctgctccctccccaagtgtctgtcattgttggtgagctctctaggatggacagggcgtgccctgctttgtggtatcgtctcctcgcagccctctctctgtcttctgacttgagaaaccagctaagaaaccagttaagctccgggcagcggctctcacagcgtggccctggggacaagtagcagatgttagcactttttaggagtacagtattcagggcgatgagatggctgagccgctgagctcttgactcatactgtgaggatttgatctctacccgcagaattgttcttttgacacattgtcttactatgtagcctcgactgacctggaacttgttacgttccagactggtctcaaactcatagcgatccacttgactctgtcccttgagtgctgacttctgggattaaaggcatgtgccacatggatcgggtttctttataaaacatatttacttttgttttatgtgtgtggttgtttttgctttgcatgtatataggtatgtgtacctgggcccgaagagggcatcagatcccttggaactgaagttacaggtgcttgtgagcctccatgtgggtgctggaaactgaacctggtgctttgggagagcagccagctcacttaatcatccctgactatctctcaagcagccttgtagaaatgcaatttcttttaaaaaaaaattgcgagagaagaagggaggtcactgcgtgaaggagtgtatccgctgccgcctctcgggtgcctgcctcccagagctgagagcgtcctactgccggcaggaagggaaggatcggatcatatttgtgaccaaagaagaccttgaaactccgagcagtgcagagctggtggctgatgaccccaatgatccctatgaggagcacggattgatactgcccaatggagatattaactggaattgcccatgcatggtggctcacaaccatcccttatgagatctggtgccctcttctgatgtgcagatatacatggaagtagaatgttgtatacaaaataaataaataaaatcttaaaaaaaaagaaaagggggtgtgtatacacctatgtcctgcataaacctgtccttgagcattaagctattgctggacgtactctgtaattgccctggattttgccactttgaaatactgtgctgagatttctcagcaaccaaaagttgttactcaggaaagtttatcgtgagaaagctgatttattctggcccattgcatcccttttggtagatttcacacctctttgggaaattatgtagatgccaaaactccttcaagagtgggtccattcctattagaagaggctgatggtcagatacttgagttggagtaaatggggttgctgccttatgcctggcacccatgtttctgtatttgcagtccagactccaaggtgtctacagatgcagggtaagattggaccctgtgactcccagtccctcctaagtgaaaggagaggcctggttttcagtttattgttttgctgttctgaaagccctggtttggggcccatgttcactagtccagtcagtcgtgatattgaggtggggacctagctgcttccggagcagaagccaacagaggaaacgtctgaatgaagtacccaattaaaaagaaacaatttctgtcctactttgaaaaaaaattgcttctgtgctgtggcagtttgagtgtaatcggtccccataatttcatagggagcggcactattaggaggtgtggctttgttggagtgggtatggccttgttggaggaaatgtgtcactgtaggggagggctttgaggttttttttttgtgtttctcttttgttttttaagaaccatcaatctaaagtagatgacttatcccttaaatcctggagtcaccactggattcccagagccagggagggagagggaccttgggcgcagaacacagatccaacaggacagatctgagataagaccctgtggatccctcctctcttccatcctacaacccagtatagattcttaatgatgcaaaagaagagaacctccagggaggggcctggaaggaggcaggagctcaggagactgaagttcatgttctgaatccacagtctcctgagtgcaggggcctagattggtcctgatgggaaaggatggaaaaacacattttaatgctgtcactcaggtaccaaaagggataaggaggcaggctccacaggagaagaacaggcctgctcctccgaacaaactaaaatgtcaacaataaagagcgaatatgggataaagagctccagtgggggtcagagcccaggctgacctgtcccagctgccctggctgctcacaatcctgggacaagaaatagctctggccaatccctgtgtccctgtgatcacagatctcagcacatggttctaagtgatgaagagaagagatccaggaggtgacagagctgaggagtgaccatgtcacagccaacatcaaattgagctccacctgggcacagccctgttatcactcagctttcacagtctcatcttatcacaccagatgcacacagcacaatgaacacagattctggaaggttctcaatgctctatttatttcctccacaaattcttagtatctcaataatttatttaacagacaatcatcctgtcagatcaggatgtgaacaatcaagttcaaattgagatccttattttcagaggggaagtcaggggtgcagctcagggcagcacagaggtgacaggatgaagatgtcccctcctgtctgctggaacaggaaggttggctgtggaagggaacacaggcagtgcagggacagggtcctggtgtgcagggctgggctgggctcccagttcttcacattgagcccataggatcagagggaatatcaggcaatgttactgagagtgaattgaatgtccctggatgtcacaggagaggcctgaacaccagacagctgtcttcattctacaaacaagagtcatgaacaatcactgtgaagacaacatccaaacaacccaccacaccattcactcacaggtgattctgggagtccctgaagccctatcatgttcaatttgcgccccccccatcccaaatcaggtcccagagtgtcacctttacaatctgagagagacacatctgagctctgggaactgtccctgcctagggttaaaatatatactttcataggaagataaaaacatgtcccctagaagattttgctggaggagctattatggatttccagagatctccaaatactacagcttcaccccaagggtctcagggacaatctttctccccatacttacctagacctggagcatattttcctcctttttcacctgtgagaagaaaagctgtgagagaccaggaaggagcccaatcctaggaattttctagaacctacagaagaccccaggttagagacaggagctatggggtgtggatgtgtttccatgaggcagagcacacttctaaaggggctgagagagaactcagaccctgccctttcttacccgagcctttcttcctcactagagccaccacaggtccaatgatcacagctccaaggagaaccagagcagcaatgactgccatgatggggacagtggactgaggaggaggctctgggaagggaagggcaggaagggaaggtgagggtcatgaccccagctctcagccctgatcctgctcatgctctgtggaagactccagctttccttgaccccagctctgtacccctccctccttaccccatctcagggtgaggggctcaggcagcccctcatggtacacatggcatgtgtatttctgctcctctccaataggcacctccacagctgcccacttctggaaggttccatccccagaaggtctggtctccaccagctccatgtcctgagtctgttcttcctcctccctcttccaggtcagggtgatgtcagcagggtagaagcccatggcccagcacctcagggtgacatcacctttagatccaggatgatgggtcacatgtgcctttgggggttctgtgtggaagatttaagaaatacaacaataacaagataaactgaaatctgcaaagacaaagttaaatcaatgatgacactgtagaatcccaagcaccagcacctcagggtgacatcacctttagatccaggatgatgggtcacatgtgcctttggggatctgtgtggaagatttaagaaattccacaataacaagataaactgaaatctgcaaagacaaagttaaatcaatgatgacactgaactatgtgtctgaacacttctgactgtcatcacactagtgacctgcaggggacgctggtcccccctcatcactgatctgtacattttcctggggggacccagaatctaagagggaatctcaggaaccagcaggtcacatggtcttccttatgtgatgttctatagcataagttaggtggtaaaagaatggaaggaggaatggaaaataattaatttatacttgtgattaaattcataccaaaataagaaattaggggcacagcctacttaaagggtgcccccaaatgcttctgccaccattgaggcacaaccactgtggccatcttgctgaccagcataactgtctgtccaagtgaacagccatcaccaagcatgcagcagtaatggtgtgaacctctgacactgggaattgaaaatgacttttaaattcctgtctttggggggaacaagatacaaggtgttgtcacccaggatccctggaagttgctgtggagcccagtgcagcactcactgagacacagtggtgttctcaggagggtatgggtgttttctgtcactccagtctttgagttgcagaagctcctgtctgtgaggaagttcaaatcccaattcactacaacaacactgtaacttcttgggactgagtgagagcaggggtctctggatggttaaatctggcagaaatagtttaaattactggaatttttctagtttaaagggaagctgacttaacttgtctaattatccagagaatcagtgctttttggcacctgtgagactgatacccatgataatacaagaggagggagagaagcaatagcaccatagggaggaagaaaaacttaactaaaagcaaaatgacaatttcaaaataaaaaagaaagaaataaaggaagaaataaataaataaataaaagaaaggtagaaaggaaaccgcacagtttagatatctcctagggtaccccacaagtgctcattctaggaagagataaaattgggatgagggagggatgcaaacctcacacactagaatctgggagaatagctggagttctacatctggatctgcaggcagcaggaagagtgagaaccactagaaccaaagcctgggctggagagatggctcagaggttaagagcactggctgcccttccagaggccctgagttcaattcctaacacccacaaggtagctcacaaccatctataatgaggtctagtgccccttctggcctgcaggcattcacttaggtggaatactttgaatataataaataagtaaaccttaaaaaaaaaaaaacagggctggagagatggctcagaggttaagagcactggctgctcttccagaggtcctgggttcaaatcccagcgaccacatggtggctcacaaccatctgttatgagatctggtgccctcttctggtgtgcagatatacatggaagtagaatgttgtatacatattaaataaataaaatattaaaaaaaacaaaacaaaacctaccaccagtgactcataccctcaaacaaggccacacccactcccataaggccacacctcctaatccctctcaagcagtgccattctctgatgaccaagcattcacatatatgagcctatggggtcatctttattcaaaccaccacattccacttttgaccccataggttcctatcaatatcataatgcaaaatgcattcagtccaaaaagcccccagagtccctcacagactcaacactatctaaaagtccaaaattcattctcttctgagactcctggcagtgtgtgaagtgtaatccatgtaaaatcaaaataaaagagtaaagcacatatatccaacatacggtggcacctgatacacgttactgttccaaaagggagaaaactgggcacagtgaggaaatactggaccaaagcaagaccacgatcccgctgggcaaactccaaactgcctgtccatgtgtgatgtcaatgcggtcttcaatcttcaactgctttttagctctgttgactgctacaggcttctttctcaggctggttccacagagttttagcacctgtctttgagaggcatcccatgactgttccatcccttcatacaatggcctctctgggcctccatgcagagacaaccctgacacacacagctgacctctgctgcttccctcagccacagagagagattccacaacccatggacaccttctgccatggaaaggacaacactttgttcttcctggagcagatacttattctggttatggatttgcctttcctgcacccaatgcttctgccaaaaccaccatctgtggacttacagaatgcctcgcgcactgccttgttattccacacagcattgcttctggccaaggaactcacttcacaccacagaagtggaacagtagcccatgatcacagaattaattagtttcaccatgtccctcaccatcctgaagcagctggcctgagagaaagatggaattgcctcttgaatacacagttacagagtcagttaggtgacagcacctggacaactgaggcggggttctctagaaggtggtatatgctttgaatcagtgtccaatatatggtatagtttctcccacagccaggatccctgattcagccaggacccacaacatactttctactgggttggaagctcagacttcccccttggacatttgggttttgaagtcctttagccaacaatctaagaaaggaataatagtgcaagaaggggtgattggtccatgttatcaagggaaaattgatttgtttctccacaatgatggcattatggagaaagattatgttgtcaggcagagatggtgcaccctttagtcctagcactcatggggcagaggcaggtgaatctctgagtttgaggccagcctggtctacagcatgagctcctgtaatgggggatgtccttctgtgtgctgtgaatatatgtttctcttattggttgatgaataaagctgttttggtcaatggacaggcaggatgtagccagacaggaagtataggctgggctatgagactagaagaaggctgggaagagaaacacagaggagtcaccaaaggagtaacataccagagcattatgggtaagccacagcatcatggcaatacatagtttaatagaaattggttaattattaagagagagagctagccaataagaagccttagccattagccatacagtttataattaatataaagctcagtgtgtatatttgggactgaagggaggtagaaccgggctgaacagaaacttctgtctacattcttggacagctagggctatacagagaaaccctgtctcaaaaaaacaaacaaacaaacagtcttagtgtcctcttatatggcaactcttataaaggaaagcatttaattggggcttgcttatagtttcagaggtttaatccattatcatcatggtaggcagacttggtcccggagaaagagctgagaattttacatactgaacaacaggcaacaggaagtgaactgtctacactgagaggaacttgaatataggaatcagaaagacaactacactcctggagaactgtcctcagtgaagaccttccctccgttctctgactgctgtgaaccaagtcccaccttcaccactgttggggtcataagtctgacctgtgtcctctcctgtgcttttcaataaagtgtctgcaagaagagccccaggaaattatgaagaaatgtcctatttgttatttgtacaaccaaactccatcacctgtaggacgtaacccaaaaggtacccaagaggcagaggcaggtggatatctgtgagttagagaccagcctggtctacaagagctagttccaggatatccttcaaactcacagagaaaccctgcctcgaaaaaccaaaaaaaaaaaaaaaaaaaaaaagaagtttggcaaatgtatgtgtttcattttgcagagtttggaaaattaaagtatgtgcaccatactacaggtacatattcaggattcccatgggcaactggtttgagttctgaaaaggctgattctgtaattgcatatttattagacattatagctaattaagacagacaatgctccagcatatatctctagtgaaatgaatttttttgcataatacaacataaagtatattacaggcataccacccaatcatacagttatacaaagatctaattgcactttaatagatatgtttaataaacataaatgggtaataaagaccccagagatagattacacaatgcttcattacctttaagtcttttaaatgctaatgagaaagtaatgatgcctgcagagagacattggatagtaggaaaaactgctaaattaaatcagcctgtgcacttcaaagatgtgttgacttcagaatgaaaccaggacatgcgttacatcggagaagacattttgcctttgtgttcattagagaagaaatctgtggatcatacctagaaggacaaagatttgacttgaacaggagaaacctcttgattaggagaggcgatagttcatcaaacatcatggccgttcaatctacactaagttgtaagactaacaaatgctcttcatttgatcaggtacaacctgccaaaaagggaactcgtcaaagttagggttggggaaggggtttgtttttgtctttccaggagaataacagcatccaactaaggactctgaagagcactggacaaatgagacatctgaaggagagagatgaataggtaaaggatgatgtcccaagaaaaagagtaaattgacttaatgatattgcacaaatccaatatgataaattctcataaatctttccagatgtttgtctctgctgttctctacagacatataaggcaaatggtctttttgtagtcccaagtcaatttatggtcatgtttgttttaacatactgtatatgtgtttctacttttgtttaaggaactgcacctacacagcccatttaaaaatgtaatgtaaagctgtagtccttgaaaactattttaatctatttaggataattaagaaatacagttagtcatctaaagcaatctaatttgcagtcaagttatgtgtgttttagggatttagaaagttagagatttgttttagatagattgctggtctttataaaccctcagagacctacacattatggcatttaagatgttttaataacataaggattttcatggcagtgagacctgtctgctcctggcagcaccagtttacttcataaaaggatgatgggcatcagagaactactgctgaccatagagagccagctcctagatggagccctgggtattgagagaaatccacagagtcagcagcaactaaaaactctttcctatctgagggggtcaggagaaatgcgctctcacacctgtgctgatggattccttctttcttctctcatgttccactctctcagatgttcctctgttacactgttggctttctctgttctatttctcatctggctctgtctttactcctggtctttccctctaattctctcatacatgattttatccttctctcgcgatgtttctctcgtgatgcccccctccaagtttctgcccccgttcctttgttctccacagctatttataccacaaaacactttaaacattacatttgaaggtcacatataatttaagtaaatgataaaaaatagagtcatttcaacagctcacaatgcaataaatgcagataaattgtcacacagcaaggaaggaatacttcctctcaggtaattccatgggggatcatcaaagtctgtcaaatcattgggaagggcctaggccctcctccatgtatctgggctgagagaatatgcctccatgaggaatgtgctgccaaagtccattagtgcactagggataaatactggttccattgtcagaggtcacatagactgcacagtcttcctaactgacacccacattcagagggcttggttcagtccagagctgattccccagctttacgactggggtccctgtattctcactaggtcaggtcagctgtttctatgagtttctccagcacagccttgactccttggctcatccctcctccctctctacaactggattccagaagtatggctcagtgcttagctgtgggtgtctgcttctacttccatcagctactggatgaaggctctaggatggcatataaggtagtcatcaatctcattataggggaagggcatttaaggcagcctctccactattgcttagaatcttagttggggtcatccttgtggatctttggagatttccctagtgccagatttctctttaaacctataatggctccctatttaaggtatctctcttcttgctctcctctgtacttcccctactcagtcttctgatccctcttgttctcctccaccctcctcttctccccttctctgtttcctatctcccgcctacacccccccccctgtgctcccaattggctcaggagatcttgtgctttttcccttctccgggggaccctgtatgtctctcttagggtactccttgtttcctagcttctctggagatatggattgtaggctggtagtccctctatgtctaatactcatataagagtgagtatataccatgcttgtctttctgtgactgggttacctcactcaggatggtttcttccagttccatccatttgcctttgaatttcaagattccattgtctccccccctgctgagtaatactccactgtgtaaatgtacattttctccattcttcaattgagggacttctaggttgcttccaggttctggctattacaaacaacgctgctatgaatatagttgaacataatgtccttgttgtatcaatgtgtacctttgggtatatatgcccaagagaggaattgctgtatcttgaggtagtcggatttccattttcctgagaaaccaccatactgttttccgaagtggctgcacaagtttgcactcccaccagcaatggaagagtgttcccctttctttacatcctctccagaataaactgtcattggtgttttgacaggtgtaagatggtatctcagagttgttttgatttgcatttctctgatggataaggatgttgagcaatttcttaagtgtctttcagtcattttagattcctctattgagaattctctatttagttctatactccactttttaattggattatttggtgttctggtgactagtttcttgagttctttgtatattttggaaatcagcactctgtcagaggtggggttggtgaagatcttttcccattctgtgtgctgctattttgtcttgcttcacagaccttgaaagaacaatactcaactttatatggaaatacaaaagaacccggatagtcaaaacaatcctgtacaataaaggaacttccagaggcaccaccatccctgacttcaagatctactatagagctatagtaatgaaaacagcttagtattggcaaaaaacagacaggtagaccaattgagtcgaattgaaaaccctgatattaatccacacacctacgaacacctgagttttgacaaagaagctaaacttacacaatggaaaaaagaaagcatctccaacaaatgttgctggcataactggatgctggcatgtagaagattgctgatagatccttatctatcacatgcacaaaacttaagtccaaatgaatcaaagacctcaacataaatctagccacactgaacctcttagaagagaaagtgggaggtacccttgaatgaattggtacaggagaccacttcctgaatataacaccagtagcacagacactgagatcaacaattagttaatgggaccttctgaagcttctgtaaggcaaaagacacagtcaacaagacaaaatggatcatgtcttttaaataaacacaaatcttaagtatactcagcctgtaaatcctggagtcaccactggaggcagcaccaggattcccagagccaggaagggaccttgggcagaacacagaaccaacaggatagatttgagataagacccgtgattccctcctctctgccagtctacaatcctggtaaattctaaaagatgggaaagaaggagagaacctccagggaggggcctggagaaggcaggagctcaggagactgaagttcatgttctcaggccacagtctcctgagtgttcatgttctcaggccacagtctcctgagagcaggggcctagctgggcgctgatgggaaaggatggaatggaaaaccacattttaatgctgtcactcagggagaacaagggataaggaggcaggctccccttacaggaacaagaacaggcctagtcctccacacaaactaaacagacaacaatagacagtgaatatgggatatagagttacagcaaggtcagagcccaggctgacctgtaccacctgtcctggctgctcacaatcttgggacaggacagggctctggccaatccctgtgtccctgtgacaacagatctcagcatgtggttctaagtgtgaagagaacagagccaggaggtgacagagctgaggagtgaccatgtcacagccaacaacacattgagctccccctggacacagccatgtgcacactcagctcccacagtctcatcctgtcccatcagagacacagagcataatgaacccatttctgggaggttttcacactgccattcatttcctccacaagctctaagtatctcagtaatttatttaacagccaatcaacctgtcagatcaaggatgagaacaatcaagttcaaattgagatcctcattttcagtggggaactcaggacctgcagctcagggcaacaggagaggtaacaggataatataaactccctgtgtgctggaacaggaaggttggctgtggaagggaacacaggggccctggatgtcacaggagagacttgaacacattgtctgtctctccatcctcatgagattgctgtcttcatggtacaaacaagagtcatgaataatcactgtgaagacaacatcctaacaacccaccactcataggcaattctgggagttcctgaaacccaatcatgtccactttgcccctcgtcccagattatcaccttcacagtctggttgagacacatctgagcactgggaactgtccctgctatattcattggaaggcaaaaacatggaccctagaagactttgctggaggagttaatatgggtggcagagctctgcaaatacttgtacaccacatgggtctcaggaacaatcctgctccccacacttacctggagctggagcatagtcccctccattttcacctgtgagaagaaaagctatgagagaccagagaggagcccgtccctaggaattttccagaatgaacagcagacccagtcagacatgggagcaatggtggtgtggatgtgtttccatgaggcagagcacagttctaaaaaagtgaaaactcagaccctgaccttttcctacctgtgtttctcctcctgttcctcacaacaactgccactgctccaatgatcacagctgcaaggagaaccagaacagcaatgaatgccatgatggggacagtggactgagaaggttctgggaagggaaggacaggaagggaaggtgagggtcatgaccccagctctcagccctgaccctgctcaggctctgcagaatgctccagctttccctgaccccagttctgtacccctccctccttaccccatctgagtgtgagtggttcaggcagcccctcatggtacacatggcatgtgtatttctgctcctccccagaaggcaccaccagagacgcccacttctggaaggttccatccccagaaggtctggtctccaccagctccatgtcctgagtctgttcttcctcctccctctgccaggtcatggtgatgtcagcagggtagaagcccagggcccagcacctcagggtgacatcacctttaggtccaaaatgatgggtcacctgtgcctttgagggatctgtgtggaaggtttaagaaatacaacaataacaagataaactgaaatctgcaaagacaaagttaaatcaatgatgacactgaactatgtgtctgaacacttctgactgtcatcacactagtgacctgtagggggcgctggtccccctcatcacagatctgtaaattttcctggggggacccagaagctaagagggaatctcaggaaccagcaggtcagatggtcttccttatgtgatgttgtatagcataagttaggtggtaaaagtattgaagaaggaatgaaaaataattaatttatatgtgattaaatgcatatcaaaatacgaaattaagaggaacggcatacatgaagggtgccaccaactactgctgccaccattgaggcacaaccactgtggccatcttgctgaccagcataactgtctgtccaagtgaacagccatcaccaaagtgtgcagtagcaatggtgtgaacctctgacactcagccagagaaaatgactctccaagccctgcctctcgggtggattacattgatggatttttgtatgttgaaccatccttgcatccctgggatgaagcctacttgatcgggatggatgatttctctgatgtgttcttggattcgatttnnnnnnnnnnnnnnnnnnnnnnnnnnnnnnnnnnnnnnnnnnnnnnnnnnnnnnnnnnnnnnnnnnnnnnnnnnnnnnnnnnnnnnnnnnnnnnnnnnnnnnnnnnnnnnnnnnnnnnnnnnnnnnnnnnnnnnnnnnnnnnnnnnnnnnnnnnnnnnnnnnnnnnnnnnnnnnnnnnnnnnnnnnnnnnnnnnnnnnnnnnnnnnnnnnnnnnnnnnnnncctgggctttttttggttgggagacttctaatgactgcttcaatttcattagaggttataggtctatttaagttgcttatctgttcttgatttaattttggaaagtgaaatctgtccggggtgtattggcttctttgttttctaaagctttcagttgtgctgttaattctctagtgtgactgttctcctgttttttttcatatgggcatttagcgctatgaactttcctcttagcactgctttcagagtatcccataggtttggatatgttgtgtcctcattctcattgaattctaggaaatctttaatttctttttttatttcttcctggacccatgaattgtgcaattgggtgttacttaatttccatgagtttgtaggttttctgtagtccgtgttgttgttgaattctaattttaaagcacggtggtctgataagacacaagggacccctcaattaatattgatggatattaatgaccattgattattgttcattcttgtttgtttttgatttggttatggtggcaagattatgtgtgggattctatcccttttttcttttgactgttggaaaattgggattatctattggctatgtttttctggttgtagttaacttccctgggttgcagtttaccttccagtactttctgtaaggctggattggtggatatgtattgtttgaatctggttttatcatggaatatcttgttttctcaggccttctcaaccccaaataaacacagggacaatatgctaattacaaaacagacagcttcagacatttattgtttcttgagtcagaacttgtccccatgaggcagctctttgaaggtaaagactaagagtcatgagcagtcaatatgaagatatctggaaggcctactgtgactcattcaaatgtctaaattctgagaaatcagggacccagtctttttcttttttcctcagccccagtcccaggtccccagggagtcaccttttccagcctccagagacaagtcagagctctgggcactgtccctgcctgcagaagaagaaatgacaaagcatttaggagactgagagtatgaggctggagtaggaattatgggctggtgggctccccatcagcttcatcccacaggcttcaggtacaatcttgctaccaatacttacctagagctagagcatagttccctccttttccacctgtgagaagaaaagctgtgagagaccagggaagaccccaagcctaggaagtttccagaaacaacaccagacccaggttagagacaggagcaatggggggtgtggatgtgtttccacgaggcagagcacactgctaaagggggctgagagagaactcagacctgccctttcctacctgagtttctcatcctcttcctcacaacaaccacagctccaatgatggtcacagctccaaggagaaccaggacagcaatgactgccatgatggggacagtggactgaggaggctctgggaaacggaggacaggaagggaaggtgagggtcatgaccccagctcacagccctgaccctgctcaggctctgcagaaagctccagctttccctgaccccagctctgcacccctccctccttaccccatctcaggatgaggggctcaggcagcccctcatggtacacatggcatgtgtatttctgctcctccccagaaggcaccaccagagatgcccacttctggaagtttccatctcctgcaggcctggtctccacaagttccatttcctgggcctgttcttcctcctccctttgccaggttagggagatatcagcagggtagaagtccagggcccagcacctcagggtgacatcaccttgagatctagggtgatgggtcacatgtgcctttggagggtctaagagaagagttggaaagatgaggtatttttcattcttcttgtaaattccaggtacttatgtgattaaccctgggaagggataggaaagccagctgcaggtagggaaatcccccagcagatgtctagacaacctttcctttggaaatttgtagaatttgggaaaggaatttctgctcctgagtgggtggggctgagactcaacaccacttgagttggactccagtggcactgtgagaatcagaccaagtctgagagcaaccatgcctcacaggggctgctatcggtccttccaggcaccctgaaacagaccccaaactgttataagaggagggtgagccctgggagagccagtccctgataaaggagaccctatagaacttcccacctcccatatttgagagatagggagacaaatggatattatgtcaaaagacacacccagagtttcccctaaagccagaaaggacacaagggtgcaccctctccaccactgtatttaatacagtgatgattttatatgagctctcagaagcagacagaagattggcataaaagggatcaaagtaggaaaggaagaagtcatactgtccctatttccagacagcttgattctttccttaaatgaccctcttgagtccacaggataacccatggacctaataaacattcttgatttcctgataaaaaaacaaatataaaaagtattcttcacttatcccagcagtgtattttcagaaaaataaattaggaaatgtataacattcaaagcaactccactagaattaagtgtttagagatctgacacaggaaatcatagagacaatgtcagaagatggaatgacaacccatgattctgaactgacagagttaatattgttacaatggcctcactacccaaattaatctgtagatataatctgcaagacttatgaaactctgatatattccatagctttagaaaaaagaaagaatttgtatgaactggcaaaagaccctaatagtcttaaggattaaggtcactgctggagtctgggcagtggtggagcattcctttaatcccaggatttgtagagcagaggcaagtggatctttgcgaattccccagtcttgcctacagagccagtaggactgtcacacagaaaaaccctgtcttggaaaactaaacaaaagcacactgctggagggttgcactccaacctcaaaatatcctgcagagctagagtgacagagacagcctggaactggcataaaatagacaggaaaaccaatagcatacaatagatatcctgcaataaaatgcaaagctatgtatatttaattttcaacaaagaatacaaaacacatattggaaaaagagtccattctacacatgatgtaacaacactgttctttttaacccgagatgaatttagattctcacctctcaccttgtacaaaagtaaacttgaaatagagcaaagaccttattaagttgaagacttgaaacacccagaattcaagaagacacctaggggaaccccttccagatactggggtggacaagaacctcagaagaggacaatagcacagctgctaatcaggccatgcgtcagcatgaagataaagtgtcttcacagcacaggacacagtcagcagagggaacagaaccataactggagaaaacctgtaccagctggactgcagacaagggactagagtcttcagtttacagagaactgcagaaactaaacaccaaggaactaacattgtcaatcaacaaatgattgaaagaactgaatagagagttgtcgtaacaaaagaaaaagcacaaatggcaaccaatatttttagtgtgttcattatctccagccttcatgaaaatgcagactaaactacttagaagggctggagagttggctcagaggtgaggagcacttgatgctcttacagaggacctgggttagactcactgtctgtgactccagtcccagggaatctgactccatcctctgaccccagacaccaggtacatacgtgggcacatgcacatgtgcaggcaaatgctggagagggtgtgtgtgtgtgtgtgtgtgtgtgtgtgtgtgtgtgtgtgcgcgcgcgcgcgcgcgcgcgcgcgtgcaaattaatacagtcattgtggaatcatttttgacatttcctaaaaaattaatcatagaactgccatatgacccagctattttattcctggttataagtctacaccctactggtgagatatttaaaccccatgcttattgttgatttatttattcattaaaagttgaattttttctatcaacatatgggtagataatggaagtttgatacacatgttaagtggaatattgtttggctctaaacaatataatcacaaaatacacaggaaatgcatgaacttagcatgtacactactatgtgaggtcacacagactcaggagggaaaactacagtatatttcctcatatgcagccaacaatatatgtacatatgtaaataagtgtacatttgtgtacagtatagcatgacgaaaagacaacaagaaaggctaaatattggggatgagaaaggactgaccataggtactgagttttaaaacaggttataaagctaattgttttctagttatttacctgtcatggattttctttctagcttcattttttttttttttcgtgttggtgctgggtaagtgctgaattatctttgataaggaatgtgtaagattcaaagtgaacctccacaagatcaatatggctaccacaactatatgtattcactgagttgtatagtctttgttcggttaattttacagtgtgagtttttctgtaatagagttaaaaattaaaaataagtagaaaaaggagcatgaccccagctgagggtttcttcttcctcaggactgagcccagcccgagggcagagggaggagatgcccgagaccccttcacctttgcgcagcagctggtccttccctttctccaggtatctgcggagccactccacgcactcgccctccaggtagtccctcagtctttctgcaataccattctgctccaacttgcccctggtgatcagcgccatggtgtcagcagccgtccacgtcctcaggtcttcgttcagggcgatgtaatcgcgaccatcataagcgtcctgactatacccgcggaggaggcgcctgtccgaccccacttcacagccagccagacattggacagtgtgagagccggggggggggggtgctgcgcggtcagcttagaaccctgtccagtcctggggtcattagcgtcccaggcctcgcctacccgggctgagcccacctcctgccccaacctcccttagattcctctaaactgacagtgaaagtgtttcccagtccgtgtctctctggtcgggagtctctgtgggtcccacatttcgggaagaacctaggacttgggatccgggcgattccggtctgtatatagggacgtgaaggttgtgacctctgacccagggtcactcaccgccttcgctctggttgtagtagtccagcgcagtcctcaggttcccttggctaatctgctgcttgatcttgactttccgtgtctccctctcccaatactccggcccctcctccatccacggcgcccgcggctccatcctaggagtctccgcgtcgctgtcgaagcgcacgaactgtgtgtcgtccacgtagccgacttctatgtaccggggctccccgaggccgggccgggagacggcggtcatgaaataccgcagcgagtgcgagcctgggggcggcgagcggtgagacctcaaccctcctcccgggaccccgggagggtgcgcgggcccggaggggagcagggcgcggggctcgggacgcgggtggggaaggggctgggcaatgacctgggcggccaccagcaggagcagcgtgcgcggcgccaccgcccccatctcagatctgggcatctgagttcctcggtctgcttggactttgcaacaggtgcctggggcgacactggttggttctgcgggatctcgacatccaatgcgggtgagaaccgccgagtcgtcatcagtgtccaggaggaaggatcagacataggttaagagctggagaagtgaaactgggtcctcctggtctctacatggcatgcctttttctgtccccagctcctgcctcctgcagagacgtggtctcaaatcacacaaggcagcccttggagatgactgctaacacttcctgcactgactcctggccatgagggctgcactatctcagcactgcacttatggaccaagttaacaatttcctccatacagtttttttatcattgttgtttttatttatgtattcattcatttatttttgagataaggtttttctaggtagccttggctgatcttgaactctctttggagactaagctgggctggaaactgtttgctagtgtctccaagggctggcattaaaggcatgcaccaccatgcctatttccacacacttcttctgtggagccctctctgggtggacttgtcccttctgatattttcctggctgcatggacacaaatgtcctttcttcacatcatcttgtcagtggagagcacatcttgccagaggtaggctcattgaacaaacccctaagttgtattaagtccacagggaagtccactctggtggcactttcatcatgccagcccacacttctgttagataaaaggacccccctctgacattccaattccagggccacatacagtgcctcatgcaagtgcccttgtcatgcctgaaaaatctctaataaaaagtgtccatccaatccatcagaacacttcctagtcctgacccccctgtttcattaagaagactccacctcctcacaacctgctcttcacaggcctctctccagccaccagcagctgtcctaaggctcctcaagggttctatctgcactgggaaataacagttctggcaccacagctccaggttcttggcttcttgctgcagcttcctccctttgcggggtggcttcctgccctgtcctgtcccctatttccttaggagtattttccctgtgtggctctaatgtctgccttgtcttctgtcacatgggaagatgtttttacactgtgctcatcagtcctagtgtccagctgtctggaagaaccagctcctcctgctgctccttcttgaggtctctttacattaagagctgatcatctgggcctctcttagtcttcttattcttagataagtgcacagacagacagacagacagacagacagacagacacacacacacacagagacatgcatccacccaccttttcagcatggctgccggcttccctttccagcctcattgcttcctgtggcctatgactctgtgagcatggctgtctctttctgctgtcatgtaacggtttcaactgctgctcaaagttatcctcactttcccaggatggatgtggtagttgtggctaataaacccagaaacctctgtcattttcaaggcatccttggagtccccatcaacacagagatgtctgaggccagactggaatttcccctatcagaacccacggccacacctggagtcaaatctaacttctgatatctttctcattgcacagattactgtgcaaactcaagacctaggaagcctcagacttcctgaaaaactaagggaagaattcagagacctccagggagttcagcatttcacccaggcactgttgggttggcaggtgctgcaggaagcagaggtgctggtgcacattcaggacagagaaaacccatgtcctggtcaggactgaggtgactaacttctgaggccctgcctgctgctgtccctggctgtcttcaaaggtggggctggccagcagcctccttgcactccagcactcactcttacagtctgcagatctgcagagtatgggtcactgtgtcacaccaacaggccacctatcactcagaaacctctctctggattccttggtgttcaagcttcactccaagggctacagcctgctcagggcagcagcatggccacaggctccagaccagccatggctcaccctgacaatgggggctactgagagctgagagctgcaagaggaaaggcaccaagaaggcagccaggatgacaagaggtgaagtcctccctcctgtgaactttgacctcagcttctgagtccttgtcctcctctgggacagctacaagtcttcagagttccctgggctcttggtgtccacagccagctcctgcagctggatgccctggagagattcagccccctgcagactgcactgcacaaggtggactgttgatggccttttgctggcttggtggctgtcttgaagctgggtaggagcaaatggtgccagcaggcctgccaaggagtctcagggacatctcctttcatcttgctgaaattgctgggacacagtgttggaaagcttgtgagagtgagttcaatagatattcttactggagaaacagcccaaggttccccaggtcacagcaaactgaatccaaggagctgggggaagtgttctctggcttgggtcttatgcaaaccagggaatggaggccctcaggtcccctggattgtacctgtgcctgtgttgaactcctttctgtaccaggcagttctaggtggtcctgattctatctggctgtgagctactggctcagcaaaatgtgggacaagttgaagccacagagacaggtgggattgtggggtgggggtggggcttgtgcaaccactgccttgaaagctgctgcatctggcacatgagatggcagtttaggcactggatacaggtggtgctgactaagcacagcaggaaactcagaatggagttccagttgtcctgccagctgagcaccagtgtacagtcagctcctgccagtttttcatttcttgatgtcttcttggtggatgactaaagcagggctccagggctccaaggccaaggcctgcaggttttagtgtcaggtggtgggacatgtaatgctggtcccttcctagtcccctgcctagcggtccccagcccttgtagccaagagtgccctctgggagtcaccaggaccaaaacttcagattgggtttctggtaggaatgatcaggatccacagtgaagaccaaaatgttaggcagcctcaggggcccaaatggggtacttgggctacattgcacctccttcacctcctggtgcctggactgcccctaaggcaacccagttgtctgctgtggtttccactgcataggtgttggctgggcaaactggatttggtggctccattggaggtcagcaaaccctttgccagactcctttttaaatactgaaggaaacattgaagttgtgtgtattcctaggctgtcctgtgatggctccagatgtgtacatggtctaaatgggaatgacacatctcctcaaaggtgtgagctttctgtggtgaaaacatttaggatcttgtctcccagctctctgaaagctataacctgttgtggctttctaagtaaccacaccttacagctgccccttacttcctcacccctacctacccaactgtagccacttctcagccactgtcacccccattgtccctttccaatctgtggctgggtccaaggatctgtggagctcaagtccatatcaggatcctcaagggtgtggacatgtgaggcctggacaagacttcctgagctgaagtggttttgttgttttggtttttgtttctcttttgagacaggacctctctatgtagctctggctctgttctggaactcactatgaccaaattggctcagaaattagagattcacctgcttctgcttcccaagtgctgggattaaagatttgcaatgtcttttcctacagctttcctctcagagcagtaggacgaacctactttcgaatccaccctgggcagtgtctctgaaccctgaaccccaagctggcacaccctgggaccataaggaagaaggacaccagcaacatctgaatagaacaggcctagtgttcaaggaagacctgtcacagctgtcctggctgctcctaatttgagggacaggacaaggctctgtccatgatgatcacagcctctgtcagcacgtgggtctcctgagtgaagagaagaccagagccaggaggcggcagaggtgaggagtgaccacatcaaaacccacagcagactcagctgtgcacagcgctgttcacactcagttctcacagcctcatcctgtcccactgcacacacacagcacagtgaccacagattccagaaggttctccatgacatcatttatttcctctacaaagctgtatgaaatcacctctttaatttacccaccaaacaaccctcaggtgaaaaatatgaacaatgaagttcacattcagattcttactttcaatggggaagtcatgagctgcagctcagagcagcatggaggtgacagaatggagatgtcccctcttgtttgatgaataaggaaggttggttatggaatggcagtggtcctggtgtgcagggctgggctgggctcccagttcttcacattgagcccattggatcacagggaacatcagacactgttgttgacagtgaaatgaggggctctgtacatcagaggagatggctgaacacactgtctgtctctaagtacactgcaggcagcagtcttcacactacagaacaagagtcatgaacaatcactatgaagacagcataccaacaacccaccactcagttactttcacaggtccaaaatctcagtgtccctgtgaaccattcatgtcccacggtccactcccatttcatcttcacagcctgtgagaaatacactagagctctgggctatgtgtgtccagggttaataacaatgcacacagagagcttcggaggatttgtctgcaggaggaattataagctgggtgaactccccaccaactcgtggtccacccaaagacctcagggacatgccttcaccaaccacactttcttgaagtccaaacacagctgccagtgattccacctgtgggaaaccaagctatgagagcagggaagctgtgaatcccagaaagtttccagaactggcagcagaccagcacagagggtcaggagacagaagaaaggatgtgtgctgggaatgaaccattttggagcctgtgagtcctcagcagggacattcccctctaacttctgaactctgaccaccgaggatcatgtccccatcgcttccaccatcatggttaagaatctgacctccattttccctgtgctttacagtaaatgattgtcagaacacagacccagagatgggcatggtgtgcccgtgtgcccgtgtgtgtgtgtgcgtgtgtgtgtgcgcatgtgtgcgcgcacgcacaggcctacacacgtgcatgcatgcacacttgtgtgcacacatgctttttgaaggtgctgaatgaaaaacaaaacacaacaacagaaaaaaatgcagaccccgcccttctatttttgtgttctttttcatccacatcataacacctccaaagataaaacctaagatcacagctccaaggacagcaccaacaattgtcctgatggtggtggtggactgaggaggctctaggaagggaagagaaaggaaggaaaggtttgggtcaatcatgacccagctctctgccctgaccctaccttctgcaaaagcccttatgcttttcttgaacccagttctgcacccactccctccttccctcatctcagggtaagggctcaggagttcctcatgctacatatgacatgtggatctctgttcctctccagaaggcaccaccacagctgccaacttctggaaggttccgtctcctgcaggtctggtgtcccccctctccatgtcctgtctctgtgcctcctcatctctcttccaggtcagggtgatgtcatcaggatacaatcccagggcccagcacctcagggtcaccttgagatctgggtgatgggtcccatgtgtctctggtgcatctgaggagaagagtagcaaagttcaggcattgtgcattcttcctggggactgcagcagtgcccatgagaccagaaatggagtgatggaggggtgaaaatcccctgcaccatttcacaggatctgagataacctgtttattatgaaattctagaatctgagtgaaacagtccaggataggagactctaggtgtccccagtatgaagaagggggctcctactcctgaccagggggctgttagagattcagtatcactgcagtcagattcccataactgtgttaagaaaacccggtctgagagaggccatggttcacaatgggcagcggaatgaaggaactgggcttgtttcaagatcttctttccttccccattaagacagattctgaattgtcctgagaggaaggtgagccctgggagagccaatctctagtcaggaatcccatgtgtggatgggcattttgttcacatgtctttaattccagctgaggcaggaggatctcttagtttgagcccatgctggtctccatagacagtcacagaagatccaggactacacagagacaccatcaaaagcaactcaaaagaaacaaagaaagtacaaaaaagaaacccaggaatgctctccctgtatcctttggaagagaggagtgatgatgcaacactgtatccagtggaaagaaacagtgtttcttctgagatgagggtgtccactccctgctgtgtctgagactgtgtttgaaaactcagctattacaatcagataagagataggcactaaaaggagaaaacaggaaaggaagcagccaaactatttctatctccagactacaggatttgtttcttaaatgacctagttgagtatactgcaaaactcttggacatgatcaacacttatggttgccagatacaaaatcaatataaagaggtagccttactttatgccagcagtgtacttccaaaatagaaaaaagaaattaggaaatgtacaacattccaagtaacttcaccagaattaagtgtttaaggatacatatgaccaaagaaagagaagaactctacaataaaaactttaagatctgacaggaaatcacagaggacaatgttagaagatggaaagacaacccaagctcctgtatgggcagtgttagcattgtgacaatggccatactaccctaattaatctacagatttaatgtaacactgtcaaaattctgatatatttcacttttaggaaaaaaatacaggtaatcatatgggatcacaaaagaccacaaatatccaaacaatctgaaggattaagaacagtgctggagagatccaagatgggccagcaggaggctgatgaaggagtttgaagagatccgaaaatgtggaatgaaaaacttccgtaacatccaggttgatgaagctaatttgatgatggcaagggcttattgttcctgacaatcctccatatgacaagggggccttcagaattgaaatcaacttcccagcagagtatccattcaaaccacccaagatcacatttaaaacaaagatctaccaccctaacattgatgagaaggggcaggtctgtctgccggtaatcagtgctgaaaactggaagccagccaccaagactgaccaagtgatccagtccctcatagcactggtgaacgacccccagcctgagcacccactccgagccgatctagctgaagaatactctaaggaccgtaaaaaattctgtaagaatgctgaagagtttacaaagaaatatggagaaaatcgacctgtggactaaaatctgccatgagtgattccaggaagtttgagcagagcccccgagcagtgcaaataccccgaaaagcaggactctgtggaaaattgacacgtgccaccacctggcatccgcttgtggcagttaccagctttctacagttttcttaatcaaaagtggtctaagtaacctgtaaagaaggattaaaaaattcacatgttcaaacaaacaaacaaacaaacaaacttttaaaaaacagtgctggaggttttacactcctaacctcaaattctactgcagaattatagtgacaagataggctgtatgtatcaagtggacattcgctctgccatgaccttgggctgtctggggatagaggagctctctctgtggtggtcagagattgaactgctagattcattcatccctggggcagaacagaagatctgggcgactaggtaacttgttgtggattcgtcagtgtattctaacaaatcctaaataccccttaagccccttacatttggagcccatgtggcatctctggagctgttggtgagcttcccaagccctctgagtctgtagagttcccagcttggatccccaggaggcaggatcccttgtctgcccaggcccaaccagcttgtcctaacagcctccctagcgcccatggaagccagaggttagctgcaagccactgtgtgcaccctgccccacagccagcactactgaacctaacccaactgtggatacattactgcccctcctcagttccaagtctccgaggcctgtctctgccctgcccccctctaggctgtctggctgaggtaacaggctactagagattctggcaggtttaactgccatgttaggaggcagacaattattttaggtcaccttatggtggggcaagtatggacacctcacagttatgtactattcaaacatccgagattccaatgactccccattgaaagacgttttctctctatagtaagatctgtccagtgtgaaggcttgtttgtttgttttgttgcttgagaagtggtgtgtacacagccatactgttctggaactgacagagatcctgctgcgtctgtctcccaagtgctgggattaaaggagtttgtcaccaagaagtaacatccagaagtgaagtcttggtgcagtgaagggctctggactcaaaccccatcaaatgttatcagaaaaaaattattcttcagttataactaaaatggtagaatttggccatgatttagttacaagtatactggctgattgaaaattaaacatgtaaagaacaaagaggaatacttaatcagacacatgaatgtattatatgaatcatgccacggaaatttgattttaccacagagcttttgttctggaacagtggtcttttactttacccgtgttcacaacatcaacataaaacatctgagtcaaagcagagtgatgtagttaagtaatctgtaaccagggctttcatgaaaccaaaaagtgagcaatggcagagagatgctgttgggacagatggaaagcagagcacttagaacttggccatggccccatcccatgactaaagcatcaccttgctcaggtgagcagtcacaggacactgggtgttcctcagggacaaaggctccagagaagcagatgagcagtgtgggagacagtgctggaaagtgtgaatgttgacagttgtgatgagaacacagatatgatggtgactccagtctgaagtgggaaaaacaacaacacagcagttatagcagtttttcaggcaacacacacataaaagactgatttccatattattaaaaaagtttaaatggctagttgttccatctcagtgagctggcattatgtactttattatatgtttttgtaattgatttaaaattaatttgtaaatggggagttgttttttaatctatgtgtgtgtttgtttttagtctatgtacttttacagtttttgctataaagatacagtttaataaagttattatttgaccctggaaaaaaaatggtgagctgttggcagagctcttctttaatcccaggactcaggaggtagagacaggtgtatctctttgagttcgaggccatcgtgatctacagagtgagtttttaggacagaaaccctgccttgaaaaaaaataaagtttaaaattgacaccataaatgggtcatttactgctgattttgtctcatttctttgagattaactgattctcctgtgaggaagcatttgacatttcttcattttttaatttttttttctagacagggtttctctgtgtagctctgacctggaccaggatggccaggatctcagtaatttgtcttcctctatctctggagtgctgagattaaagatgttcaccactactgcccagaaaagttttcactgtttaagaaagctttttaatacactgagatgtgctacatagactccccccccacacacacaaggctttccctgctgatcccaatactccaatattaatgtggtcctcatcaatttcctagctacccacactagtagactctgccttatgagttccagcgttaccatcagaggctgcaccaggattcccagagccagggaggtagaggcagagcagaacacagtcccttcaggacccgatccaaggtgagtcccctctgatgatcctatacacaagggttagattctgagagattgggggagggggagaacttccaggcaacagctctgaaaggaggcaggggcaacagatcaggggactgagggtcacctcctgagtagaggggactttttggcacagggacaggaaaaacacctcccactgtggcccctccccaggaatgacaacagtgctgctcctctatagaaaccaagaagacaagaaataaacagggacctttgttaaaccaccacagctagtaggactgagcccaggcagtccttacactgcagccctggctgctcacaatcctgaacacaggacagggctggggacacccttgtattcctgtgatcagtctgccagcatgtttttatactaagtgacaaggacaaaagagccatggaggacatagctgaggggtgacaacaaaaccaacatgcagtgagctccacctggcccagcaccatcctcactcagctcccacagacttctcctgtccctgctgacggtcagcacagcagacacggattctggaaggttctccatgctgctatttattttctccatcacactttcagaattctcacctttaatttgaactgccagtctctcaggtcaaggacacgaaccatcaaattcatattcagatttttattttcagtggggaagccaagggttgcagctcatggtaacaggaaggtgacaggatgtagttgtctcctcctgcctgtgctggaccaggaaggttggctgtggaaggaagcaggagcagtgcagggccaggatctttgtggacaggactcggctgggctccccaatttttctcattgtgtgtaaggaaaaatgcatacattgctgcctaaagagaattcattggctcttaagtcagaactggtcactcagtccaatgaggcagctgtcctaagcgaaagaacacaagtcacaaaagtcaatataaacacccctcaaaggcccaccagtcactaaaaggcctaagtccaagaggacttgggactccatcaattcttccttgcctcagccccaatcccagccccccagggagtcaccttttcaaacatccagacaagtcagagctctgggcactgtccctccttgtgtgggaaactgtctgtgctgggcttcagtcagagccaggagtctagtcctagattcagttcttacctgaaagggggagtgtagattgagagagtctagctaaagacagtaaggaaaagacagagatacaggatagagtcagaagggcaattcagcgaatactgaatgccccatattaatttttcaccagtcttaaataccttaaccaaaaagcagaacatggtatcatacatgaagaacaaactgacttgtcttccttatttctccaaagattcaacttcttattacctggtcttgatgttcaggagtaaccacacctcagaccatgtctgttgttatttagataagacagccaaggccaagattgaacatcctagtgtagccatgcctttgacatttaggtattatgacttactgaggacagttttgaactctctgcccttgagccaacatgaagcagagcaatctttatgggaaccgacatgcctgcagaagaaataaccagacacagtcaggagactgacagctgtgactggaggagaaaccatcagctcagcctccgccccaagtgccgccccaatttttccctcacatcctgaccttcagcagggtcacagtctccttttccacctgtgagaagaaaagcagtgagagataagggaagttctggttcccagaatgttttcacactgtgactgcagaccagggaagggtcaggggcatgaggaaggaagaagctatgcagggaagaaacaatggcagtctgcaggtctgtcctcagcagggacttccccctgtcctttgaaatcaggtccccatcacttccatcttcagggtatgagcatttccttctttttccatgtactttagagtaggtgattgtcaacatacagacccagcgatgggcatgggtgtgctagtgtgtgtgtgtgtgtgtgtgtgtgtgtgtgtgtgtgtgtgtgtgtgtatgtgtgtgtgtgtgttgcttcccattcactattcatccttcctgaaggtgctaaattaaaataactacaataacaacaaaaccccaaacaaaacagaccctgccttccacacctgtgttctttctcatccacatcataaaacctccaatgatacaaactaagatcacagctccgaggacagcaccaacaatggtcccgatggtgatggttgactgaggaggctctgggagtgaagggagaggaagagaagatgagggtcatggtttagctgtcaaatctgaccctgcccagggtctacaaaatgcttcagctttctttctttcattctttttttttaagatttttatttattatgtgtacaatattctctttgcatgtatgcctgcatgccagaagaaggcaccggatctcattacagatgttgtgagccaccatgtggttgctgggaattgaactcaggacctctggaagagcagctagtgctcgtaagcactgagccatttctccagctccacttcagctttcttgatcccaggtctgcaccgcatttctccttaccccatctcagggtgaggggctcaggcagcccctcatgctccacaaagcatgtgtaattctgctcctctccaacaggcacctccactgctgcccacttctggaaggttccatcccctgcaggtctggtctccactatctccatgtcctgtgtcaattcttcctcatccttattccaggtcagggtgatgtcagcagggtagaaccccagggcccagcatctcagggtgactttaccatcaggttttgggtgatgggtcacatgtgtctttggagggtctgaggagaatagttggaaagttcaggtgttttgcaggggactccagcagggtcactgtgaccatcttggggtgggtcagaaatgaggtgagggaggggtgaaaaatccctgtagcttagacacagggctctggataatctcatctttgggaaattctagatatgggtgagagagtccaaggtcacagaactctggtgtcacatcaggaagaagggacttctgttcctgactgatgagtggggctgatggatacagcatcactgaattcagactccagagaccttgagtgtgggcagagaactgggcctgagcaaggatgtggcccacacaggactgcagactgatggctaactgccttggttatttcaggaaccttctctccttaccttctgagacacactctgaactgttctgacagaagggtgagccctgggagagtcagtccccgacaaagggtcaggagaccctatagaactttccacttctcatatttgagagataagaggacaggtggatattatgccaaaaggagaatcacccagagtttcctttaaagccaggaaggagacaagggtgaacactctccaccatcatatttaatacagtgatgattttatataagctatcagaaataggcaaactattggcataaaagggatcaaagtaggaaaggaagaagtcacactgtccctatttccagacagcttgattatttccttaaatggccctgttgagtcctcagcaaaactcttggatctaatgaacactcatggttgccagacacaaaatcaatataaaaagtagacttcagttatcccagcattgtattttcagaaaaataaattaggcaatgtacaacattcaaagcaaaaccaccagaattaagtggttaaagatatatctacccaaagaaatgagagagctctcaagtaaaaccttcaagatatggacacaggaaatcatagaagacaatgatagaagatgcaaagatgacccatgctcctggactgacagagttgatattgggaaagtggtcatactactcaaattaatgtatagatataatctgcaatacttacaaaactgtgatatattgcatagctttaggaaaaaaggaagagaatttgtgtcaaatgagaaaagaccatgagcagccaacaatcctaaggattaaagtcactgctggaggctgggcagtggtggagcattcctttagtcccaggatttgtgtggcagaggcaagtggacctctgtgagttccaggcgagtcttgcctacacagccagtaggacaatgacacagagaaaaactgtcttgaaaaacaaaacaaaagcacactgctggaggattgcactctaacctcaaattatcctgtgtagctagagtaacagagcccgcctggaactggcataaaatagacatgaaaataaaaggcatagaatataaatcctgcattataattcaaagctatgcatatttgattttcaacaaagaatgcaaaacacatattggaaaaagagcctattctacacatgatactgcaacactgtgcttttttattaacctaagaatatgaatttagattccaacctcccaccttgtacaaaagtaaacttgaaatacagcaaagacctcattaagttcaagactcgaaacacccagagttcaaacagacaacctaagggaaccccttctagatactggggtggacaacaacctcagaagaggacaatagcacagcagctaatcaggccatgcatcagcatgagagaagtctcttcacagcacaggacacaatcagcagatggaacagaagccacaataggagaaaccggtaccagctggactacagacaagggactagagcccttagtttacagagaatgcagaaactaacattgtcaatcaaccaatggtcaacagaactgaatagagagttgtcttaataaaggaaaagcacaaacggccactaacattttcagtgtgttcagtatgtctatcctacattgactaaactacttagaagggctggagagttggctcagaggtgaggagcacttgatgctcttatagaggacctgggttagatgcactgtgactccagttccagggaatcacacacactgctctgaccccagacaccagttacacatgtgtgcacatgcacacatgcagggaaaacactcatccccataaaagaatgaaataaaaatgaaagttaaaactgctttgtgatagcacctcacccagtcagaatggctgtcaccaagaaatctgacagcaaatgcaggagaggacgtggagagagaggagccatactcactcctgtgtgtgtgtgtgtgtgtgtgtatgtgtgtgtgtgtgtttgcacgcatgtgtgagcgcatgagtgagcaaattaatacagtcattctggaatcattttgaacagtgcaggaaaaaattaatcacaaaaactatcatattatccagctattttattcctggccagaagtccacaacctactggtgagatatttataccctatggttattgttgatttattcactaaaaaattcgatttaattcatcaacagtcatgtagataatggaaatttagtacacatataaaatgaaatattatttgcctcaaaacaatgtaatcacataatacacaggaaaatggatgaacttaccatgttctatattaagtaaggtcacacagttgcagaaagaaaaattactttttctttcctcatatgtagccaacaatatatatacatatgtaaataagtgtacatgtgtctatactataacatgaccaaaagacaagaaaggctaaatattggggatgagaaaggactaaccaccggttctgagttttaatataaagctaattttttttttttagttatttatctctcatgggttttctttcttcgtttcttttgcgtgttggtgatagataagtgcatggattatatttgctaaggaatatgtaaaatccaatgtgaatctccacaagttcataatggctaaaccaagtatatatattcgctgagacgtataacgtttgttctggttaactttttttttttttttttcgagatagggtttctctgtggctttggaggctgtcttggaactagctcttgtagaccaggctggtctcgaactcacagagatccggctgcctctaccacccgagtgctgggattaaaggcgtggaccaaaaacgcccggcttgttctggttaattttagagcatgacttattctgtaagaaagttaaaaaattaaaaataagtacagaaagggatggattacccccagctgaagggtctcttcttcctcaggactgagcccagcccaagggcagagggaggagttgcccgcaccccctgcacctgtgcgcagcagctggtccttcccgtgctccaggtgtctgtggagccactccacgcactcgccctccaggtaggctctgtgtctctctgcctcaccagtctgctcccacttgcgccaggccatctgtgcctccgggtcagcagcggtccacgtcctcaggtcgtcgttcaaggcgatgtaatcgttgccatcataggcgaactgttcatacccgcgctggaagcgcccgttcgaccccaggtgacagccagacagatgctggaatgtgtgagatcctggtggggggggaggtggggagcaaagtcagcaccgacagcctgcacctctgcgggggtcacctccgcctacgtgtcccgccacaacatcatctgggcctctcggctccacccaccgcgaccagctcccgcacctgtcctgcccattgtccccgcccacccttggactcctctaaactgaaaagaaacgtgggtctctgtccctgtctctctggtccagagtctctgcgggtcgcacatttcaggaagaaactcagacttgagacccccaggacgacttgggaccccataaatagggacgtgaaggtcatgacctccacccgagttactcaccgcccttgttctggttgtagtagccaagcagagtcctcagtttccctcggaaactctgttcaagttccttggctttccgcgtctccctctcccaatactccggctcctctcgctccatccactgcgcccgcggctcatatctcggattctccgcgtcgctgtcgaagcgcacgaactgcgtgtcgtccacgtagccgacggcgatgaaccggggctccctgaggctgggccgggactcgatggtgtagaaataccgcagcgagtgcgagcctggggacggcgcgcggtgagaccccgaccctcctcccgggaccccgggcgggtgcgcgggccgggaggggagcagggcgctgggatccggacgcgggtggggaaggggcctttggatgggcgatgcggggacgtggcttctctggtgccgcccccgccctccccccactcacccgcactcacctgcaccagtctgggccaggcccaggatggccgccagccacaggagggcacagagcacagggatccgcatcttcagggttagggggagacaaagcacagccctgtatggtcatggaatttgtaatttgtcttcacagagacttctctcctgtttctaggaacacattctcatggttttgagattgctgttgctctgggagccaacttgaaagccactgacagaccaggaagggataggaaaagccaacacttcccaacccaaaccccaccttcagctctttaaccctaaagcaattctgaggactttgttctgaatcctcccactgttcagagtcccatgtttaatactgtctccctgaaccctgccctgatggtaatcccagggaaaccatctgcatgaacacagctgttttcctgactatcccaatccccaaatctcagtgatggcctagagctggtcagcaatgcagtggagagatggtttctcttgaaagtagaggctttggcctgcaagcaccacacaagactcccacagaccaggatcctgtgttcccctgcagtgggagctgacactgccaaacctgactggttaggaatctgagttctccatatgtgaaggaatgggttaaacagtcatgtgctagacccagagtctcctagcgtttcttcccaggtgatgcctccctggccccagttgtgttttaggatgatctttgtgtgaaaccagaccacagctgtccccttccctgcagtgcctggatgcagcccagcactgaaggctgcccacattccacgagttactgtacagacactcctatgatctggtttaattaataaatgggtcacatgaagaagtgagcaattggtgctggagagatggcttggtggataagagcactggttgctctcccaaaggactggaattcaattcccagcatccacatggcagttcacaactgtctgtgaccccagttccaggggatccaacaccttcacaccagcgcacataaaatcaaataaattaaaagaaagaagtgaacaatttcacaaagcagattcttcccacccacaactgtctgtcctgcactcacacttgcggtgatgagatgacacacaagctgaggagaggagaaagatggatggtgcctggtggggacagcggctctgaaaactgagtgggtcctgagtacctcagccctgtgcagtgtggacaggggaggacactgggcagaggacgactcttatgccaggtggcatagactggcaggacagagatgtcattagacagaagggtcacaatctaaataaaatgtaatgtcacttttatatgtcatgtgtgatttgttattttcagttaaaccaagacctcagttaaaccagggtcactaaaactgtggaaagtggactccatgaagacacaggtcttatccaggatacagacttctgggattcacaatcaagatgaccagaatcctgacccatcttcctgaagtcactccatgttgtcactctgaactactatgactttcactgctttcctcctatttctgtccccagctcctgccttctgcagaggccatgatctcaaaccacacagctcagcccttgaggatgatgctgatacttcctgccctgacaactggccatgcagactgcactttctcagccactgcacttaggacggagttaacaatttcctccatagacactttttctttttttagtgttgctgtttttatttatgtattcattcatttatttatgagataagttctccctaggtagccttagctaacctggaactctccatggagactaagctggcctggaaactgcttgctagtgcctcccaagggctggcaaaaaaggcatgcaccaccatacccatttccacacacgttttctgtggaaaactctcagggtggacttgtgccttcctacacctcatggctgcatggacacaaatgtcctttcttcatgtcttcttgccagtggagagcacatcttgccaaaggtaggttttttgaacaaactcctatgttgtattaaggccacaggaaattccacactgtgggcactttcatcatgccagcccacacttctgttagatgaaaaagaccccccatctgacactccaattctagggccacatacagtgcctcaggcaagtgctcttgtcatgtctgaaaaatctctaataaaaagtgttcattcaatccatcagaacgcttgctagtcctgcccctcctgtctccttaagaagactctgcctcctctcaaccagctcttcacagtcctctctccaaccaccaacagctgtcctaacaggctccttatatgggttccatctgcacagggaaataacagtcctggcaccccagagcctgagtcttggcttcttgctgcagcttcctccctttgcagtgtggcttcctgccctgtcccctaactccttaggaacattttcctgtgtggctctaatgtctgccatgtcttctgtcacatgggaagatgttttcacactgtgctcctcagtcctggtgtccagctgcctggaagaaccagctccttctgctgctccttgatgaggtctctttatattaagagctgttcatctaggcctctcttagtcttcttatgcttatataacctcatgcacatgcatgcacgcacacacacacacacacacacacacacacacacacacacacacgttttcagcatggcagcaccaggtcccctcacactgaggtcagggtcgcctgagctttcccctcagcaaagccctcccctctctctccccacctgcctttctgtctgtgatccatgatcatattttttaattcattcaacaaaaatttattgggtatcaatgttttcagagtccctggcactggaagccatcgtccctcacaagacaaagatggcagcaccatgacagatcatgacctccttggtcatcagacatctctgctaaggctcctggagctcttgactcgaagtcagaaggctagaaaagaaaacacaggggtcatatcctggagcaggggatgaagtaatttccatctttgattttcccacaacctatttttaaaatttactaattttacatctgtatatttcctagaagagaaagtgggaagtaccttgaatgaattggtacaggagaccacttcctgaacataacaccagtagtacaaacactgagatcaacaattataaacagaacctcctgaaactaagaagcttctgtaaggcaaaggacatagtcaacaagataaaagggatcatgtcttttaaataaacatccatctaaagtagactcaacctgtcaatactgtagtcaccactgggggcagcaccaggattcccagagccagaaacggggcggggaccttgggtagaaagcaacaggacaaatctgagatgagaccctgtagatccctcctctctgccaccgtacaactctggttaaattctaaatgatgggaaagaaggagagatcctcaaaggaggggtctggaaggaggcaggagctcaggagtctgaagttcatgttctcaggccacagtctcctgagtgcaggggcctagttgggtcctgatgggaaaggatggaattgaaaaccacattttaatgctgtcactcagggagcacaagggataaggaatcaggctccacttacaggaacaaaaacaggcctagtcctccatacaaactaaaaagtcaacaataaacagagaagactggatgaagagctacaatcaggtcagtgcccagatgacctgtcccctggctgctcacaattctggggactggacaaggctctggccatgaatgtgtccctgtgtttacagatgtgagcatgtggttctaagtgatgaagagaacacaggtagcaggtgacagagctgaggagtgaccatgtcacagccagcaatggactgagctccacctgggcacagccctgttctcactcagctcccacaaactcatcctgtgtcaccggatgcacacagcacaatgaacacagattctggaaggttctccacactgccatttattcgcttctcaaattctaagtatcccaataatttatttaatagacaatcaacctgtcagatcaagaacatgaacaatcaagttcaaattgagatccttattttcagtggggatttgaagggctgaagctcagagcagcatggaggtgacaggaaatgtcccctcttgtctgctgcaacaggaagggttggttggctgtggaagggaacacaggtagtgcagggacagggtcctggtgtacagggctgggctgggctccacagttcttcacattgagcccataggatcacagggaacatcagacactgttgctgagagtgaactgaggggtcctggatatcacaggagagggctgaacacattgtctgtcactccatccatgccaggcagttgccttcaccctacagaacaagagtcatgaacattcactgtgaagacagcataccaacaacccatcactcactcacaagttattctgggagtccctgaaacccaatcatgtccactttgcctcccccagtaggtcccagagtgtcacctttacaatatgggaaagacacatctgagctctgggaactgtccctgcctagtgtaaacacacacacacacacacacacacacacacacacacacacactggaaggtaaaaacatgaacgctagaagactttgctggaggagctaatatgggttggcagagctctgcaaatactccaggtccatccaaagcctctcaaggacaatcctgctcccacacttacctagagctggagcatagttccctcattgtccacctgtgagaagaaaagctgtgagagaccagagaggagcccatccctaggaaatttccagaaccaacaggagacccaggttagagagaggagcaaggtgggggtgtgtggatatgtttccatgaggcagagaacacttctaaaaggggctgagagagaactcagaccttcccttttctacctgtgtttctcctcttcctcaccacagccaccacagctccaatgatggccacagattcgaggagaaccagaacagcaatgactgccatgatggggacagtggactgaggaggaggttctgggaagggaaggacaggaagggaaggtgagggtcatgaccccagctctcagccctgaccctgctcaggctctgcagaaggctccagctttccctgaccccagctctgcacccctccctccttaccccatctcagggtgaggggctcaggcagcccctcatggtgcacatggcatgtgtatttctgctcctccccagaaggcaccaccagagatgcccacttctggaaggttccatccccagaaggtctggtctccaccagctccatgtcctgagtctgttcttcctcctccaacccacggccacacctggagtcaaatctaacttctgatatctttctcactgcatagattactgtgcaaactcaagacctaggaagcctctgacttcctgaaaaactaagacccttgggggatctgtgtggaagatttaagaaaccgcacaataacaagataaactgaaatctgcaaatacaaagttaaatcagtgatgacacttaattatgtgtctgaacacttctgactgtcatcacattagtgacctgcaggtggcggtggtcccctcatcacggatatgcacatttccagggggacccagaagctaagagggaatctcatgaaccagcaggtcacacggtcttccctatgtgatgttctatagcataagttaggtggtaaaagtattgaagaaggaatgaaaaataattaatttatatacattattaaattcatatcaaaataagaaattaggggcacaggctacaaaacagtgccaccagttactgctgctacagttgagggacaaccactgtggccatcttgctaaccagtataactgtctgtccaagagaacagccatcaccaaagtgtgcagtagaacctctgacactcaggcagagaaaatgactccccaaaccctgcctctagggaggacaagatacaaggtgttgtcacccaggatctctggaagtgtgctgtggatcccagtgcagcactcactgggacacagcagtgctcacaggggtgtgtggattttccctgtccttccagtccttgaattctagaagaccctgtctttgaggaagttaaactcctaattcactagggcaacagtgtaactcctgggcctgagggagagcagggggctctggatggttaattctggcagaaaatagtctaaggtcatgggactctttcgtttaaagcaaacactgacttaacttatgtaattatccagagcatcagtcccccatggcacctgtggagactgacacccatgatagtacaaggggagggaaagaagcagtatcaccataacgaggaaaaaaaaaaaactgactaaaagtaaaatggcaacttcaaaaaagaaaagaaaaagagcctccccccaaaacacgcaatttggaatcctcccagagcaccccttaaatgctgctgtgaccattctaggaagagattgaaattgcggtgtgtgagggatgcaaacctcacccacaggaatctgggataatgtattttttggaaagttctagaaactggggaagcagcctagagtcggggcatccatgtctccatcaggtaaaggagactttctgtcctagactcagacactgggtgtgggcagagaacccggcctggcagaggccatggctgacagagggctgcagactgaggagccactgctggggatgtgggcatcttctctcccgccctcctgagacagatctggaaccgtccagggagaaggctgagccctgggagatgagtgcagcccctgccaggctggatcaggagccccagggtcactgtgtcccctcagagacaggggcatgaccccagctgagggtctcttcttcctcaggactgagcccagcccgagggcagagggaggagatgcccggggcccctgcacctgtgcgcagcagctggtccttcccattctccaggtatctgcggagccactccaagcacgtgccctccacgtaggccttttcattctctgcaaaaccagtctgctcccacttgcgtcgggtgatctgcgccgccctgtccgccggtgtccacgtcctcaggtcctcgttcagggcgatgtaatcgcggccatcataggcgtcctgacggtacccgcggaggaggcgcccgtccgaccccatgtcacagccatacatcacctggatggagtgagagcctgggggtggggggaaccaccgggtcagtcccactcagctgtccagccctggggacatcggcccagcgcccccgctcactcgtggatcctctaaactgaaagggaaaccagattccggttccagctctcctcctcccggacctcagacctgggacccggggcgactttggaccgtacatatgttcgtggaaggctgtgacctccgacccagggtcactcaccgccctcactctggttgtagtagtcgagcagggtccttagattccctcggtaaatctgctcgctgattttgacaaaccgtgtctgcctctcccaatgctcaagtccctcccgcttcgcccacgtggtcagcggctcatatctcagactctccgcgtcgctgtcgaagcgcacgaactgcgtgtcgtccacgtagccgacggcgatgaaccggggctccccaaggccgggccgggacacaatggtgcggaaatacagcagggagtgcgagcctgggggcggcgagcagtgagaccccgacccttctccaggaccgcgggtgggtgcgcgggccgggaggggagcagggcgcggggctcgggacgcgggtgtggaaggggcgggaaggtctggctgggctttgcgggacgcgcttccctggtgtcggccccgccctctccgcagaggccgtttccctccagaccctgctctcacctgcgcgggtttgggtcagggcctgggaggccaccagcagcaggaggtcccagagcagagggctccccatcttcagggttagggggagacaaaacacagccttgaatggtcgtggactttgtaaatttgtcttgacagacttctctcctgtttctaggaacccatggttctcatggttgaggttgttgtctctctgggagccaacctgacagccactgacagaccaggaagtgaaaccaaaagcctacacttcccaatcaaaaccccatcttcagctcttagatcctgaaaccaattcttaggacttgggactttgtcctgagtccttccacctggcattattcctgtgtatgacaccgtctccttgaaccccttcccagagtctgtctgatggtaatcccagggaaactatctgcatgaacacagctgttttgctattttctatcccaactcccaaatctcctgatgaccccgagctggtcagcaatgcagtggagagatggtttctcttgaaagcagaggctttggcctgcaagcaccacacagactcccacagagaccgggatcctgtgatcccctgcagtgggagctgacactgccaaacctgactggttaggaatctgagttctccatatgtgaaagaatgggttaaacagccatgtgctagacccagagtttcctagtgtttcttcccaggtgatgcctccctggccccagttgtgttttaggatgatctttgtgtgtgtgaagccagagcatagcttcaacactgctgtcccctttccctgaagcgcttggataaagcccagcactgaaggctgcccacattccacgagttactgtacagacactcctatgatctgattcagttaagaaatcgggatcattaaaaagtgaacaatttcacaaagcaggttcttcccacccacaactgactgacctgcgctcacacttgcggtgatgagatgacacatgagttgatgagaggaggaagatggatggtgcctggtggggacagtggctctgaaaactgagtgggtcctgagtacctcagccctgtgcagtgtggacaggggaggacactgggcagaggacgactcttatgccaggtggcatagactggcaggacagagatgtcattagacagaaaggtcacaatctataatgtaatgtcacttttatatgtcatgtgtgacttgttattttcagacttcagttaaaccaagatcactaaaacggtggaaagtggcctcagagagccagatcttatccaggacacagccttcttggattcacagtcacaatgaccagaatcctgacccatcttcctgaagtcactccatgctgtcactttgaaccactatgactttcactgctttcctcctatttctgtccccagctcctgccttctgcagaggccatgatctcaaaccacacagctcagcccttgaggatgatgctgactcttcctgccccaactcctgccatgcaggctgcactttctcagccactgcacttaggccccaagttaacaatttcctccatacatagtttttcttcttctttttttaaagatttttatttatttattatgtatacaacattctgcttccatgtacatctgcacaccagaagagggcaccagatggttatgagccaccatgtggttgctgggaattgaactcaggacctctggaagagcagttggtgctcttaactgctgagccatctctccagcccccccccccagtttttcttcttaattgttgtttttatttatgtatttactcatttatttttgaggtattgtctccctggatagtcttatctgacctggaactctccatggagactaagctggcctggaaactgtttgctagtgcctcccaagggctggtattaaaagcatgcaccaccatacctatttccaaacacattttctgtggaaacttctctgggtggacttgtgccttcctacattctcctggctacatgcacacaaatgtcctttcttcatgtcttcctgccagtggagagcacagtcttgccaaaggtaggcttttggaaccaacccctatgttgtatgaggccacaggaaagtccactctggtggcactttcatcatgccagcccacactcctataagataaaatggacccgcctctgacagtctgattctagggccacatacagtgccccaggcaagtgcccttgtcatgtctgaaaaatctctaataaaaagtgttcattcaatccatcagaatacttcctagtcctgcccctcctgtctctttaagaagaatctggctcctctcgaccagctcttcacagtcctctctccaaccaccaacagctgtcctaacaggctccttatatgggttccatctgcacagggaaataacagtcctggcaccccaaagccagattctggcttcttgctgcagcttcctcccttttcactattgcttcctgccctgtcccctatttccttaggaacattttccctgtgtgaatccaacatctgccttgtcttctgtcacacgggaagatgtttttacactgtgctcctcagtcctggtgtctagctgcctggaagaaacagctcctcttgctgctccttgttgaggtttctttacattaagagctgatcatctaggcctctgctagtcttcttatgcttataaagatgcatgcacacaaactcacacctgccttttcagcatggctgccggcttccctttccagcctcattgcttcctgtggtctatgactctgtgagcatggctgtctctttctgctgtcatgtaacggtttcaactgctgctcaaagttatcctcactttcccaggatggatgtggtagttgtggctaataaacccagaaacctctgtcattttcaaggcatccttggagtccccatcaacacagagatgtctgaggccagactggaatttcccctatcagaacccacggccacacctggagtcaaatctaacttctgatatctttctcattgcatagattactgtgcaaactcaagacctaggaagcctctgacttcctgaaaaactaagggaagaattcagagacctccagggagttcagcatttcacccaggcactgttgggttggcaggtgctgcaggaagcagaggtgctggtgcacattcaggacagagaaaacccatgtcctggtcaggactgaggtgactaacttctgaggccctgcctgctgctgtccctggctgtcttcaaaggtggggctggccagcagcctccttgcactccagcactcactcttacagtctgcagatctgctgagtatgggtcactgtgtcacaccaacaggccacctatcactcagaaacctctctctggattccttggtgttcaagcttcactccaagggctacagcctgctcagggcagcagcatggccacaggctccagaccagccatggctcaccctgacaatgggggctactgagagctgagagctgcaagaggaaaggcaccaagaaggcagccaggatgacaagaggtgaagtcctccctcctgtgaactttgacctcagcttctgagtccttgtcctcctctgggacagctacaagtcttcagagtctcctgtgctcttgttgtccacaggcagctcctgcagctggatgtcctggagagattcagccccctgcagactgcactgcacaaggtggactgttgatggccttttgctggcttggtggctgtcttgaagctgggtaggagcaaatggtgccagcaggcctgccaaggagtctcagggacatcatcctttcacttgctgaaattgctgggacccagggctgggaaactagtgagggtgagttcagtagatattcttcctggaggaacagcccagggtcccctagatcacagcaaactgaattcaaggagttgagggaagtggtctctggcttgggtcttatgcaaaccagggaatggaggccctcaggtcctctggattgtacctgtgcctgtgttgaactcattcctgtaccaggcagttctaggtggtcctgatcctctctggctttgagatgatgtctcagcacaatgtgggaaaagttgaagccacagtggcaggtgggcttgtggagtaggggtggagcttgtacaaccactgtcttggcagctcctgtatccagtatctgagatggcagtttaggcactggatgcagctggtgccgcccaagcacagcaggcaactcagaatggagtctgtttatcctgccagctgagagccagtcagaggtcagctcctggaagggtggagggtagatgttgcctagagcagccctgtgacacaggatcaggggaccttggtgatgagtccccaagaaccaggaagagcaatatcccaatgactctgaggctgtccatcaggtgatggtgctgctggccttactctgtgagaaagcacagagctccaacataagaattcacagcaaagcttgtctcctccacccagaaccatgaggctttctctcctttagttcattccagaattcagtgtaccaatatgatggcttcaagcaactccagagatcaggggtcctggttgggctgccaatgctgcaccaaggacatcagcttatctcccagtgagctcacaatctcagagataactgagccacctgctgctgctgctgctcacatgagccagccagcacagtttttgtattcttgatgtcttcttggtggatgtctaaagcaggggtcttgctccagggacccaagtccaaggcctataggtttgagtgtcaggtgctgggacatgccatgctggtcccctcttagtcccctgcccagcctgtccacacccctagtagccagtcatgccctctgggagcctccagggccacagctttagattgggtttctggtgggaaagatcagggtcctggaaatgtgaattgccacagaaaggccaaaatgtcaggcagcctcaggggcccaaatggggtacttgggctacactgcacctccttcacctcctggtgcctggtctgccccaaggccacccagttgtctgctgtggtttccattgcataggtgttggctgggcaacctggatgtgatagctccattgggggtcagcaagtcctttgccaggttcctatttaaatactgaaggagacattgaagttgtgagtattcctaggctgtcctgtgatggctccagatgtgtacatggtctaaatgggaatgaacacatctcctcaaaggtgtgtgctttctgtggtgaaaacatttaggatcttgtcttctagctctttgaaagttataacctgttgtggctttgtaagtaaccacaccttacagctgccccttatctcctcacccctaccccaactgcagccacttgtcagccactgtcactcccattgtccctttccaatgtgtggttgggtccaaggatctgtgaagctcaagtccccattaggatcctcaagggcgtcaaggtgtggagcccttgacaagacttcctggagttgcagtggctttttagtttcctttttagtttctgttttttttttttacttaaaatatataattttattattaattttcaaatttgagaatttcattcacatatatagtatattttaaagaaattcacccccaattcccttccgttcaactcatctcctatcaactccaccacttttctttcccaagtgcatatgctggccttaaaaaatatatttagtgttgcctctcggtgcatgagtctagaatgacccactagagtatgtgtagcctctcagggaccatatcccttgagaaaactgattcttcacactccaaagagtcataagttacctcctcattttgtttctgtgttgatacaggatatttctatgtatccctggctctgttctaggaactcactatgaccaaagtagcccaaaagttagagattcaccagcttctgcctcccaagagctgggattaaagatgtgcattgaattttcttacagctttcctctcagagcagtaggacagacctcctttcctatccacccagtgcggtgtctctggaccttttgtcccaaactggcacacctgagacattaaggaagaagtactgatgggggatgtttctctttttggttgatgaataaaaacactgattggccagtagaggcaggaagataggtggggataggagatgaggagaattctgggagacaggagagagagaccatgaaaagaagccatgttgctgaaggagtaacatggtgatttatgggtaagccacaaccttgtggaaatacttatattaatagaaatggattaataattaagaaagagttagccaataagaagccctagtcatcggccaacagatgagtataattaatatagggcttgtgtgtttatttagggctgaagctgctgggggaaagaaaccttcatcttcaaaacgcctgaataaaatctgaataagaacaggcctagtcgttcaaggatgacctgtcacagctgccctggctgctcctaatttgagggacaggacaaggctctggccatgatgatcacagcctctgtcagcacgtgggtctcctgagtgaagagaagaccagagccaggaggcggcagaggtgaggagtgaccacatcaaaacccatagcagactcagctgtgcacagcgctgttcacactcagttcccacagcctcatcctgccccactgcacacacacagcacagtgaccacagattccaggaggttctccatgacatcatttatttcctccacaaagctgtatgaaatcacctctttaatttactcaacaattaacactcagctgaaggattggaaccatcaagttcacattcagtttcttattttcagtggggaagtcatgagctgcagctcagggcagcacggaggtgacaggatggaggtgtcccctcctgtttgctgaataaggaaggttggttgtgaaatggaacacagggcagtgtagtgacagggttcttgtgtgcaggggtgggatgggctccccagttcttaacattaagctcctgagatcacagggaacatgagacactgttgctgagagtgaactgaggagctctggatgtcacaggacagccctgatgacagtgtctgttacacagtaaacaccaggcatcagtcttcacgctacagaacaagagtcgtgaacaatcactgtgaagacagcatcccaacaacccatcactcactcacacccagcttaccccatcccagggtgaggggctcaggcaacccctcatggtgcacacgacatgtgtatctctgctcctccccagaaggcaccaccaccactgcccacttctagaaggttccatcccctgcaggtctggtcgccaccatctccatgtcctgtctctgtgcctcatccctcttccaggtcagggtgatgtcagcagggtagaaacccatggctcagcacctcagggtgatgttatcttcaggtctgtgatgatgggtcacatgtgtctctgctggttctcaggagaagagttggaaagttcaggcattgtgcattcttcatggggactgcagtagtgccaaagagaccatcctgggaaaggtcagaaatggggtgataaaggcgtgaaaatccccagcagtatttcacagtatcctggataatccctttattatgaagttctagaatctgagtgaaacactctagggtaggagactgtaggtgtcccaacatgaaaaggggacttctgctccggactggggagcgcttagtgattcagtatcactgttttcagactcccatgactgagtgtctgcagaacaccaggtctgagagaggtcatggtccccaatggatcacagaatgatggaactgggcttgtttcaagatcttctcaccttcccattaaaaaggattctgaactgtcctcagaggagggtgagccctggagagccaatctatactcaggaattccatatgtggctcagcattttgtcagatacctttataccagcccaggcaggtggatctcttcattttgagcccatgctggtctaaataggaaattacagggcacccaggagtgcacagagagacaccatcaaaagcaatacaaaagaaacaaagaaaattcacaaaagaaatccaggaatgctctccctgtgtcttgtggaagacagtagtgatgatgcagcattgtatccagtggagagaaacagtgtttcttctaccaccaggaatgagctgaggatatcaactctctgctctatctgagactgtgtttgaagactcagctattacaatcagataagagaaagtcataaaaaaggaggaaaacaggaaatgaagaattcaaactatcccgatcgctagacaagtttcttttcttatatgctttgattgagtgtattgcaaaactcttggacctaatcaacacttatggttgccagacacaaaatcaatataaaaaggtagccttcatttatgccagcagtatacttccaaaaaaaacaaaaaagaaaaagaaaaagaaattaggatatgtacaacattccaagtaactccagcagaattaattgtttaaggataaatatatccaaaaaacggaagaactctacaatgaaaactttaagatctgacagaggaaatcatagcaacaatgtcagaagatggtaagacaatccaagctcctggattggcatagtttacattgtgacaacgaccatactaccctaatgaatctacagatttaatgtaatgctatcaaaattctgatgtatttcacatttagaaaaaaatacaaaaaatcacatgggatcacaaaagaccacaaatagccaaaaaatctgaaggattaagaacactgctggaggttttacactcctaacctcaaattctactgcagaattataaagacaagacagcctgtttgtatccagtgggcatttgctctgcccatgaccttgcgctatctggggatagaggtgctttctctgtggtggtcagagattggactgctggatccattcatccccggggcagaacagaagactgaggcggcttgctaccttgttgcgttttcgtgagtgctttctaataaatcctaaataacgcccttataccagctatcctggatttgcctacatttggcgcccacgtggcattagcctccagcctccacagctgttggcaagcttctcatgcccactgaggcctaagctttcccatgtgggattccccgggattccgtctgaccagtgcataggctccacccccctgccctgtcgcctcctgagagccattgggggccagcagttagttgcaggctacagtgtgaatcccgtcccacaacaggtccaactgagtttaacccaactgctggtgcattcctgtccctcctctgttccctgtcaggaaggtctgtgctcacctgcccgctttcctgccctgacccctgcctggcagaggctgcaggctaccacagacttggatttaactgctgctaggaggaaactgcctggcctagggctgaactgcaccacacccagttccacagcctctgagatgcttccccagggcttattctgctagagcttgagctgtggctgccagccacagggtcccaggtcagcataagctgcaagttgctctttttcttctaactctgtgagcccatgtcagagaggatccaatacccaagtatgtaaaacatacttggggaaaatatgatgctgcaacactgggtttctacctcaggagatgaacttcgagtctcacctttcttttctttcttactttcctttacttgctttttctttgttttctttccttcctcctgttatggtggaggttccatccaagacccctcccccatctccctccaaactctgctgcatctcagaaagcctgccaaatgatggtccctaccccaatgatactcaagaccactcctacagggtatttaaactgccccccagagaacggactcttggtttttctggtcttcttttccagtctcctctctggggggctgaaggccacccagaagctttgtatccattaaacgtgggcttttcctaattgggtttgatttggtctgatttggagtgctgcatgggcagagaggcttatccaggtgtagacaattttcaccttccattcttttttgaaacagtgtttcactgggtaactatgtctgtcctggtactcagtacattaggctgacctccaggtcacagagatccacctgcctctcccttgtgggtgctggccttaaaagtttgtgccatcttttaccttccacaaagatgaactcaaaacagagcaacgaccttgcctttttttcaagatatccatgttattgtgtattgtaaaatgcccattggctgaacataatttattcataagtgaccactggaaaagcaaaagcaagatcagcaagttgaaggttgaatttacctgatagacaaaaatgctaatcagtgtctaattattaaacatgatagtaaatacaaataacagtttcagaagagtagatattatatgtaagactgatacaactattaatggtgaatcacattctttttctaaaaaaaggaaaatttaaattctgtctcatgtcccaagggttgactgatataggacagaagaaaaccaaaattaagggattattgcattgtcaattatctcataatcctttggttttattttgaaataaagtagcttcctgtacttgtttttgcatttgagactgaggcaagtaagcaggaactcagtttgtgtaacctggatttatttaacagactgtggtcctttcaagactgctgcacatggcatttagaatgcttaacttttctgcagtgaactgtcaccatcctagcagtgacctttaagatctccaagaagatgatggggcctggaaggaagcaggagcttaggagactgaagttcatgttctcagcccacactctcctgagtgcaggggcctattgggtcctgatgggaaaggatggaaaaacacattttaatactgccactcgggcaccaaaagggataaggaggcaggctccacccacaggaaaaacaacaggtccatacaaactaaaaagtcaacaataaacagcaaatatgggataaagagctacagccaggtcagagcccaggctgaccagtcacaggagccctggctgctcacaattctggggacaggacaagtctctggccatccctgtgtccaggtgatcatagatctcagcatgtggttctaaatgatgaagagaacagagccaggaggtgacagagctgaggagtgaccatgtcacaaccaacaatgaaataaatgagctccacctgggcacagccctgttcacactctgcagcctcatcttatcacaccagatgcacacagcaccatgaacacagactctgggaggttcaccatgcttccatttatttcctccacaaattcttagtgtctcaataatttatttaacagacaacctgtcagatcaaggaacaatcaagttcaaattgaggtctttattctcagtggggatttgaagggctgaagctcagggcaggatggagctgtcccctcctgtctgctggaacaggaaggttggctgtgcaaggaaacacaggcagtgcagggactgggttcttcctcagttcttcaaattgagctcataggatcagagggaacatcagacactgttgctgagagtgaaatgaggggccctggatgtcacaggagacacccgaacaccagacagctgtcttcattctacaaacaagagtcatgaacaatcactgtgaaggcaacatcccaacaacccaccactcactcacaggtgggtctgggagtcactaaaacctaatcatgtccactttgtcccaccccaaatcaggtcccagagtgtcacctttactgtctgggagagacatatcagagctctgggaactgtccctgcctaatgtaatatatatagtaatatagtaatataaatatatgaaggtaaaaacagggccccaagaagatttttctggaggaactcctatggatttgccagagccccttgaaatactacagcttcaccccataggcttcagggacaatcctgctctcctcacttacctggagctggagcatactttcctcttttttcacctgtgagaagaaaacctgtgagagaccagggatgagcctgatcctagtaatttcctggaactgacagcaaatccatgttagagccaggagcaatggggaggagggtgtgatgtgtttccatgaggcagagcacacttctaaaggggctgagagagaactcagaccctgccctttcctacctgtgtttctcctcctcttcctcacaaccaccacagctgtaatgatggtcacaactccaaggagaaccagaacagcaatgactgccatgatggggacagtggactgaggaggctctgggaagggaaggacaggaagggaaggtgagagtcatgacctcagctctcagccctgaccctgctcaggctctgcagaaggctccagctttccctgaccccagctctgcacccctccctccttaccccatctcagggtgaggggctcaggcagcccctcatggcgcacatggcatgtgtatttctgctcctccccagaaggcaccaccactgctgcccacttctggaaggttccatccccagaaggtctggtctccaccagctccatgtcctgagtctgttcttccttctccctttgccaggtcagggtgatgtcagcagggtagaagcccatggcccagcacctcagggtgacatcacctttagatccaggatgatgggtcacatgtgcctttgggggatctgtgtggaaggtttaagaaatcccacaagaacaagataaactgaaatctgcaaagacaaagttaaatcaatgatgacactgaactgtgtgtctgaacacttctgattgtcatcacactagtgacctgcaggggccgctggtcccctcatcactgatctgtacattttcctggggggacctggaagctaaaaaggaatcacatgaaccagcaggtcacatggtcttccttatgtgaggttctatagcataagttaggtggtaaaagaatggaagaagggatggaaaataatttatatatgtgattaaatttatgtcaaaataagtgggatagggtacataatgggtgctctcaactaatgcagccaccattgaggcacaaccactgtggccatcttgctgaccagcataactgtctgtccaagtgaacagccattaccaaagtgtgcagcagaaatgggatgaagctctgacagtcagacatagaaaatgactctgcggggacaagatacaaggtgttgtcacccaggatctctggaagtgtgctgtggatcccagtgcagcactcactgggacacagcagtgctcacagcagtgtgtggattttctctgtcactccagtcctggaattgcagaagaccctgtctctgaggaagttcagttccttattagctggggagcaacactctaacttggtggggttgagggagagcagtgggggtttggatggttaattctggcagaaaatagtctaaggtcatgggaatctttcctttaaagagaacaatgacttctctaattgtccagattacagtccccaagacaccggtggagacagatacagatgatgatgaaaagggaaggttgaaacagtatcaccccagtgaggaggaaacactgactaaagcaaaatgacaattaaaaaaaaaaaacaaagaaagacaaaagaaaagaaaacatattttagaagtttttttgcagggcaccccatgagtgctcacgtgaccattctaggaagcgttaaaattggggtgagggaggggtgcaaacctcacccacaggaatctgggagaatgtattctttggaaagttctagaaactggggaaccagccttgggtagggacatccaggtctcccatcaggtaaaggagacttctggtcctggtgtgtaaagctgacacactcagacactggctgtggacagagaacccggcctgggagaggccatggctggcagagggctgcagactgaggagccactgctggggatgtgggcatcttctctcccgccctcctgagacagatctggaaccgtccagggagaagttctgagctctgggagatcaatgcagcccctgccaggctggatcaggagccccagggacactgtgtcccctcagagacaggggcgtgaccccagctgagggtctcttcttcctcaggactgagcccagcccgagggcagagggaggagatgcccggggcccctgcacctgtgcgcagcagctggtccttcccgttctctaggtgtctgcggagccactccacgcacgtgccctccaggtaggccctccatccatctgcatgcaacaccagcctgctcccacttgcgtcgggtgatctgcgccgcggtgtccgcagccgtccacgtccttaggtcctcgttcagggtgatgtaatcgcgaccatcataggcttcctgactgtacccgcggaggaggcgcccgtcagaccccacgtgacagccgtacatcctctggtaggtgtgagagcctgtggggacccagcggtcagccccgcccacttgcccggccaccggctccgcccacacttggactcaaggtaaactgacagtgaaagtttcccagttgcgggttatctggtccagagtctctgcgggttccatatttcgggaagaacctcggacttcgaagcggggagactctgggacgtacctagggacgtgaaaggtcttgacctcggacctgcaccactcaccgccctcgctctggttgtagtagcggagcagggtcctcaggctcactctgaaagcctgctcattattcttggcgatccgtgtgttcctctcccaataatccggttcctcccgctccacccacggcgcccgcggctccatccttggatactccgcgtcgctgtcgaagcgcacgaactgcgtgtcgtccacgtagccgacagagatgaaccggggctccccgaggccgggccgggacataatggtgcggaaataccgcagcgagtgcgagcctggggacagcgcgcagtgagacaacaactctcctcccgggaccccgggcggatgctcgggccaggaggggagcagggctcgggacttggatgtgaacgtataagaggtgtgagggacggtctgactgtgagatgcaactatgtggcttccccggtgccgtccccgccctccccacagaggcggttttcctctcgacccggcactcacccgggcgggtttgggtcggtgccagggcggccaccggcagcaggaggacgcagaccacagggatcaccatcttcagggttagggggacccaaagcacagccctctatggtcatgggctttgtaacttgcttcgcagagacttctaagaacctgttctcatggttgtgaggttgctgtctatctgggggccaacctgacagccactgacagagccaaaagtgaaaccaaaagcctacacttcccaatccaaaccccaccttcagctcttaaaccctgaagtaattctgaggacttgggactttgtcttgactccttccactgcacagtgtatataacactgtgtatgatactgtctgcctgaaccctggcccagagtctgtctgatggtaatcccaggaaaataatctgcatgagcacagctgtttttctttcctatcccaactcccaaatctctgtgaggaccctgggctggtcaggaatgcagtggagagatggtttctcttgaaagcagaggctctggcttgcaagcaccacaaactcccacagagaccaggttcctgtgtccacctgcagtgggagctgacactgcccagaatctgagttctccatatgtgaaggaatgggttaaacagtcatgtgctagacccagtgtctcctagtgtttcttcccaggtgatgcctccctggccccagttgtgttttaggatgatctttgtatgtgtgaaaccagagcatatcttcaacacagctgtccccttccctgcagtgcctggatgaagccaagcgctgatccctgaccacattccatgtgtacagacactcctatgatccagtttaattaataaatcagtcacatgaagaagtgagcaattgggactggagagatggcttcgcagataagagcactggttgctctcccagaggactggagttcaattcccggcatccatatggcagttcacaactgtctgtgaccccattttcaagagatccaacacacttacaccagtgcacacaaaattaaataaattatttatcagaaagaagtgaagaatttcacaaagcaggttcctcccacccacaactggctctcctgtgctcacacttgtggtgacgagatgacacaggagctgagtagaggaggaagatggatggtgtgtggtgtggacagtggctctgaaaactgagtgtgtcctgagtacctcagccctgtgcagtgtggacaggggaggacactgggcaggggacgactcttaggccaggtggtatagactggcaggacagagatgtcattagacagaaaggtcacaatctaaataaaatgtaatgtcacttttatctgtcatgtgtgacttgttatttttcagacctcagttcaacaaaggtcactaaaactgtggaaagtggcctcagcagcgagtcaggtcttactcaggatacagacttctgggattcacaatcatgatgaccagaatcctgacccatattcctgaagtcaccccatgttgtcactttgaaccactatgacttgcactgctttcctcctatttctgtccccagctcctgccttctgcagaggccatgatctcaaaccacacagctcagcccttggggatgatgctgacgcttcctgccctgactcctgccacgcaggctgcactttctcagccactgtgcacccatacacattttcagcatggctgccggcttccctctcttagcctcattgcttcctgtggtctatgactcccagcacagctgtttcttgctgctgtcatgtaacggtttcaactggtacagtaaattatcctcagtttcacaggatggatttggttgtcatggctaataagcccagaaatctgtgtcaatttnnnnnnnnnnnnnnnnnncagttcattcaacacagagatgtctgaggccagcctggaatttctccctcagaacccaggccatacctggagtgaactctctaacttctggtgtctttttcactgcacagattactgtgcacactcaagacctcagacccttagacttcctgaaagactaagggaagaattcagagacctccagggagctcagcatttcacccaggcactgttggattggcaggtgctgcaggaagcagcagtgctggtgcacattcaggacagagaacacccatgtcctggtcaaggctgaggtgaataacttctgaggccctgtctgctgctgtccctggctgtcttcaaaggtggggctggccagcagcctcctcccactccagcactcactcttacagtctgcagatctgctgagcatgggtcactgtgtcagtcacaccaacaggccacctgtcactcagaaacctttctatgtattctttggtgttctggctccactccaaggcccacagcctgttcagggcagcagcatggccacaggctccagaccagccatggctcaccctgacaatgggggctactgagagctgagagctgcaagaggaaaggcaccaagaaggcagccaggatgacaagaggtgaagtcctccctgctgtcaactttgacctcatcttctgtgtccttgtcctcctctgggacagctacaagtcttcagagttccctgtgctcttggtgtccatagccagctcctgcagctggatgccctggagagtctcagccccatgcagactgcactgtacaaggtggctgttgatggccttttgctggtttggtggctgtcttgaagctgtgtaggagcaaaaggtgtaggcaggcctgccatggagtctcagggacatctccctttcacttgctgaaattgctgggacccagggatgggaagctcctatggtagaattcagtagatatcctgaatggagcaacagcattaagttccccaggtccacagcaaactgaattccaggagttgggggaagtgtcctctggtttgggtcttatgcaaaacaggaattggagaccctcaggtcccctggattgtatttgtgcctgtgttgaactcattcctgtaccaggcagtcataggtagtcctgatcctttctggctttgagctgctggctcagcaaaatgtgagacaagttgaagccacagtggcaggtggggctgtggggtggaggtggggcttgtgcaaccactgccttggcagctcctgcatcctgtacatcagatggcagtttaggcactggatgcaggtgggtgttgcccaagctcacctggcaattctttttttgttttgttttgttttgttttgttttgttttttgagacagggtttctctgtggctttggaagctgtcctggaactagctcttgtagacgaggctggtctcaaactcacagagatctgcctgcctctgcctcccgagtgctgggattaaaggcgtgtgccaccaacgcccggcccacctggcaattcttaatggtgtctgatcatccttctagttgtctgaaaactatagcttgctgtggttttctagtcaccacaccttacagctgcccatttctgcaatgttccatcccctgcagacctggtctccaccatcttcatgtcctgattctgtgcctcctcatccctcttccagttcagggtgatgtcagcagggtagaagtccagggcccagcatctcaaggtgatgtcatgtcacattcaggtctgtggtgatgggtcccatgtgtctggtgggtctcaggagtagagttgggaatttcaggcattgtgtattcttcctggggactgcagcagtgcctatgagaccagaaatggagtgatggaggggtgaaaatgcccagcagcatttcacaggatcctggataatctgtttattatgaagttctagaatctgagtgaaacagtccagggcaggagactctagttgctccttcgttaaaaaaaagggaggggacttctgctcctgactagggggcacttagctatatcatatcactgtattcagactcccatgactgagtgtgtgaagaaaacccggtctgagagaagccatggttaacaatgcgcagcagaatgaaagaactgagctttttcaagatcttctctccttccctgttaagacagattctgaagtgtcctgagaggagggtgagccctgggagagccagtttctagtcaggaatcccatgtgtggatgggcattttgttcacatgtctttaatgccagttgagtcatgaggctctcttatttgagcccatgctggtctacgtagagagtcacaggagatccaggactacatacacagacaccatcaaaagcaacacacacacacacaaaaaaaaacaaaaaacaaaagaaaatacaaaaaaaaaaaaaaaaaagatgtccaggaatgctttccctgtgtcttatggaagagaggagtgatgatgcaacattgtatccagtatagagaaacagtgtttcttctgagatgagggtgtctgttttctgctctgtctgagactgtgtttgaagacccagttgttacagtcagataagagaaagaaaaaggagcaaaacaggaacggaagaaatcaatctattcctatctttagacaacaagattcctttcttaaatgacccggttgagtgtactgaaaaactcttggacctaatcaacatttacggttgccagatactaaatcaatataaaaaggtagccttcatttactccagcagtgtattttcagaaaaagaaattagaaatgcacaacattccaagtaactccagcagaattaattatccaaagaaacagaagaactctacaatgaaaactttaagatgtgacacaggtaatcatagcgacagtgtcagaagatggaaagacaacccaagctcctggactggcagagttaacattgtgactattgcataccccccaaattaatctacagatttaatgtaacactatcaaaattctgatacatttctcttttagaaaaaatacaagaaatcacttggaatcacaaaagaccacacatagccaaacattctgaaggattaagaacactgctgtaggttttacacacctaacctcaaattatactgcagaggtatagtgataagaaagcctgtatgtatctagtgtgcattcactccgccatgaccttgagctatctgtgcatagaggctctgtatctgtggtggtcagagattggatagcgagatacattcatccctggggcagaacagaagactaaggctgcttgctaccttgttgtgtattcgtgagtgtattccaatacatcctaaataaccccttaaaagtgttctcttggattggtctacatttggtgcccacgtggcatcagcctccagcctccacagctgttggcaatcttctcatgccccctgagccccaagagttcccagcttggatccctgggaggcagaatcccctgtctgccctgcgcacaggctccagccctcctgccctgcctcctcatgagcgcccatgggagccagcagttagctgcaccccacagcatgaaccccgccccacagttggcacaactgagcctaacccaactgctggtgctttccctgcccctcctctgttccctgtcaggaaggcctgtgctcacctgcccgctttcctgccctgacccctgctgggcagaggtggcaggctaccacagacttggatttcactgctgctaggaggaaactgcctggcctagggctgaactgcaccacacccagttccacagcctctgagatgcttccccagcgctcattctgctagagcttaagctgtgcctgccagccacacagtccgaggtcagcatgaggccgcaggttgctctttttcttctaactccaggagcccaagtcagagagtatggaataccccctacacctgtaactggcatgaaacaggaaaaaaatcaaaggaatagaacagaggtcccagaaagagagaaacaatgcacacttaattgtagacaaagaatgtaaaacacacattgggaaaatacgatgctgcaacagtgggtttctacctcaggagatgaactttgagtctcacctttctttcttcctttcttttgttttttctttctttccttccttctgttatggtggaggttccatcaagacccctcccccacctccctccaaaccctggtgcttctcagaaagcctgccaaatgatggcccctccccaaagatactcaagagcacccccacaggtatttcatttgcccgccccgccccagggaacagactcttgatttttcaggtctccctttgcagtctcctctctgggcagccagaaggccatccttgagctttgtatccattaaacgtgggctatttggccgagagaattatctgggtgtagaaacttttctccttcctttttttttttttttttttttttttttttttttttaannnnnnnnnnnnnnnnnnnnnnnnnnnnnnnnnnnnnnnntgtcctgccctcaaggtcacagagatccacctgcctctcccttgtgggtgctggccttaaaggtttgtgccatcttttaccttctacaaagatgaactaaaaatggagcaaagaccttatctttttttcaagatatccatgtcattgtgtattgtaaaatgcccatgggctgaacataaattattcatgagtgaacactggaaaagcaaaagcaagattagcaagctgaaggttgaatttacttgatagacaaaaatgctaatcagtgtttaattattaaacatgaacataaatgcaaataacagtttcagaactaagagtagatgttatatgtaagactgatacagctattaaaggtgaattacagtctttttctaattcattcaataattaataaaaaccaacagacaggtaaaaagtcaagatacacaaacaccagtgttccatgtctctaagttcaacgactgttttcgaattctgttgtattggtaatcttgcaaatacaatttcagtattaaaaaattgtcagctcttggaaaatgtctattagtaaaggacctgccacacctgttggtaaaatatctactacaaatgcaagaacaattcaaacacaattattgggaactatttaggatttcaacccaagaaagcacagtgtcaggaacctatgaaaatgtgctctgtggtctcacaaaaatgggagctgtgcttacaggtctaccgtgcacagggcctgcaatcattggtggctgatatcatttgatgctagccaaaactaagttttctagtaagaaaggccatgagtgtcacctccatccctgtgggaaatgagtgtactgaaaaactcttggacctaatcaacatttacggttgccagatactaaatcaatataaaaagaacaggatttggttcagttccaaagttccactgtggccatgtctaagatctgatcctccaaactccattgtatgtgcctcaaatccatggtactgcaaaagcaaagaccatattattttcaaaccttgaaacacccaaacttcaagaagacaaatgagggaaaacccttccagatactggggtagacaagaacttcagaataggacaatagcacagaaactaattaggccatgcatcagcatgaagataaagtctcttcacagcacaggacacaatcatcagagggaacagaagtcacaataggaggaaacttgtaccagctggactgcagacaagggactagagccctcagtttacagagaactgcagaaactaaacaccaaggaactaaactaacattgtcaatcatccaatggttgagagaactgaatagacagttatcttgaaaagggaggaggaggagtagaggaggaggagatgaagaaaaggagaagagaaaagatgaagaagagaaggaggagtagtaggaggaggtggaggaggagcagaaggagccatggtattgggagagggagacatggaaagcaaaggccaaccatcagacattttcaggaaaactacttttctgtctgcctactataagcattgccacaatggtgagtgaccaccaatctaaagtcagaacccctccaagttgccagtgtcaggacccaaattcccatggtgacaagtcccaggttctgcccaagatacagactgacatctggttttctgttcagtttagtggaggtcatgggtggctggggctgtggagccggcctgactgctgggatggggccaggctctcacaccatccaggtgatgtctggctgtgatgtcgattcgaaaggatgccttctccgtgaatatgaacaatttgcctatgacttttatgattacatgtccctgaacaaggacctgagaacgtggactgccatggacatggtggcagcacagatcactagtctggagttggagctggctggtgaggcagagagatacagggcctacctggggggccagtgtgtggaaatgcattgcagatacttggagaaggtgaatgtgactttgagcacaggtgcacaggccaagggcaactcctcactctacacaaaggctatgataaatctgtgttcttcaacacattccaaatataacaggattagagggcgaaggctgacactgtagacctccaaggtgtgatgagccattgggtgagcctgaagtgttgctcgcatagggggtgaaggctgacacaggctcaggacagtgtgaatgtgaggccattgcaggagagcatggctgctactttgacccgacctgcaggacgtcaacctggggcaagagagtcagggatagggaatggggacaagagacacagaaagatcgatcacaagacaggattctgatcaagtggcaaactttacttttctcaggctatcttatatagtcaggatatggagaggggcagaatgggttgtttgcgcaccaggtgttagtataggcatgatattaggaaaccacaaacaggatgtttggcagggtaaagagttcatgagtaagaggtccaggaagggtttgcctaggtgactgagcctgtgaatggaggactgggtttctaaggagcttctatgtaaaggttaactatgtgccctgccaagcatgggctaggatctcattccaagccccgagatttggctcccaacactgcttctcctttgcagccctggatatggccccttccctgagtcctgctgcagtggtccaggtttcacaggctgtgcagagtcctctgtggagtctgattctctacttggtccactgggaacctcagtcctcagattcccaacactgatgtatttggattttgaagactgtcctctgttaattgtgacaaattctttccttgaatgcagtttttgcttttttcctcatgatacaagatcctgaccaagtgtccagccctggagcccccctgtgcctgaatggagacgtagtgaccgttgttctggttgttatctccaccctgttgcttcacagttacaggcttcctacttcccaaggactatcccttaccctttggcttcccagtacccagtccagtgtatcccggtgctgtgtaccattttggataaaagaaccctagattaagagacatgcagaagaaatgtgtactttaaatacaaatatgagcctttcatattgggggttctaagacaccagaggcacttctgcaagctgtggagggctcactaccaacagggctgttaattttatgggtcttttcattcttttccctgcatccacttaggatgagaggatgtagtggctctcctctcttgatgcctggcgtccctgcacaggctggcaacccccatgtgtggattcagactgccactgagaccctgagacccaggggcagacacttgtattttaggtgtccttacggtggggcaagtgtgctattcaaacatccaagattccaatgactccccattgagaaatgttttctctgtatagtaagatctgtccagagtgaaatcttgtttgtttgtttgttttgttgtttgagacagggtctctccacatagccaggctgttctggaaatcacagaaatttccctgtctctggctcccaagtgctggcattaatggagtgtgtcaccacgaagttacaaccatgaaatgttggtacagtgaagggctctggactcaatcaccatcaaatgctatcagaaagacttttatttaaaaaaagacttttattcctgttgtgactaaaatggtagaagtcgaccatgcattctgttcacgagtatacaggcctattgaaaattaaacatataaagaaaaagggaaatacataatcaggcacatgaatgcattgtgtgaatcattccccagaaatctgatttgaccacagagcttttggctctggaaccatggtcttctcctttacccatgctcacaacatcaacataagacatttgggtcaaaggagtgtgatataatacgtagggaagtaatctgtaaccagggctttcatgaatcctagaaagtgagcaatggcagagagatggtgttggctaaatggaatgcagaggacttaagagaacttggccatggccccatcccattgtaaagcatcaccttgctcaggtgagcagtgacaggacactgggtgtttcttagatacaaagactccagggaagcagatgagcagtgtgggagacaatgctggaaaactgtgaatgttcacagatgtgaaaagaacacagatatgatggtgactacagtctgaagctggaatagcagcaacacagcagttatagcatttctttttcaggcaacacacacataaagaccaatttccatatcattaaaaaaagtttaaaatggccagttgttgacagagctcttctttaatcccaggactcaggaggcagagacatgtgtatctgtttgagttcggggccagcctggtgtacagagtgagttccagtacagccaagggtacacagggaaaccctctcttgaaaaaagaaagtttaaaatggacaccatgaacaggccatttactgctgattttgtctcatttgtttggaattaactgatactcctgtgaggaagcattcaacatttcttcatttttttttagattttatttatttattatgtatacaacattctgcttccatgtatatctgcaccagattcataacggatggttgtgagccaccatgtggttgctgggaattgaactcaggacctctggaagagcagtcagtgctcttaacctctgagccatctctccagcccttcattgttttttttttattttgctatttcagacagggtttctctgtgtagtagccctgactgtcctggaccagggtggccaggatctcagtgattttccttcatctatctctggagcgctgggattaaagatgttgattacttcacagaatattcttcactgtttaagacagcttattaatatactgagatgtgctacatagaaagattcacacacacacacacacacacacacacacacacacacacacacacacacacacaatgcttcacctgctgatccaaatgttaccaaagttccttggtcttgatcaatttcttaattacccacactagtagactctgccttaggagttctagggttagcatcagaggctgcaccaggattcccagagccagggaggtagaggcagagcagaacacagtcccttcaggacccgatccaaggtgagtcccctctgatgatcctatacacaagggttagattctgagagattgggggagggggagaacttccaggcaacagctctgaaaggaggcaggagctcaggggctgagggtcacctcctgaggacaggggccttgttggcacagggacaggaaaaacacctcccactgtggccccactccccaggaatgacaacagtgctgctcctccatacaaaccaagaagacaggaaataaacagggagcttggttaaagagccacagctaggactgagtccaggcagtccttactctgcagtcctggctgctcacaatcctgaacacaggacagggctggggacacccttgtattcctgtgatcagtctaccatcatgtggttatactaagtgacaaggacaaaagagctaaggaggacatagcttaggggtgaccacaccaaacccacatggactgagctccaccaggcccagccccatcctcactcagctcccacagactcctcctgtccccatgacagtcagcacagcagacacagattctggaaggttctccatgctggcatttattttctccatcacactttgagaattcttgcctttaatttgaaatgataatctctcaggtcaagcacatgaatcatcaaattcatattcagatttttattttctgtggggaagccaaggcctgtggttcatggcagcagggaggtgacaggatggagttgttttctcctgtctgtgtggatcaggaaggttggctgtggaagggagcagggtcaggatcctggtgtgccagggtgggttgggttccccatatttctcattgtatgaacagaagaaactcagacattgacatctaaagagaattcactggttcttaaggcagaattggtcactcagtctcacttgtgtcacgaaagtcaatataaaggtctctcaaaggctcaccagtcactgaaaggtctaagtgccagaggccttgggactccgtcctttactccttgcctcagctccaatcccaggcctccagggtgtcaccttttcaagcctccagacacaagtcagacctctgggcactggtcctgtctgcagaagaaataaccagacacagtcaggagactgacagctgtggctggaggagaaaccatcagctcagcctccaccccaagtgccttggggacaattcttccctcacatactgacatgcagcaggggcaaagactccttctccacctgtgagaagaaaagctgtgagagatcagggaagtcctggtcaccagaaagtattcacagctgtgactgcagaccagggaagggtcaggggcatgaggagggaagaaggtatgcaggaaagaaccaatggcagtctgcaggtctgtcctcagcaaggacatctctgtcccctgaaatcaggtccccatcacctccccccatcatcaggatatgaacatttctttcctttaccaagtactttagagtaggtgattgtcaacatacagacccagagatgggcatgggtgtgctagtgtgtgtgtgtgtgtgtgtgtgtgtgtgtgtgtgtgtgtggtgtgtgtgtgtgtgtgcgtgtgtatgtgcatgtgtgtgcgtgtgtgtatgtgtgtgtgtgtgcgtgtatatgtgcgtatgtgtgtgtgtatgtgtgtgtatgtgcatgtgtgtgcgtgtgtgtatgtgtgcatttgtgtgtgtgtatgtgcgcgcgtgtttgtgtgtgtgtatgtgcgcgcgtgtttgtgtgtgtgtatgtgtgtgtgtatgtgcgtgtgtgtatgtgtgtgtgtgtgtatgtgcatatgtgcatatgtgtgtgtgtatgtgtgtgtgtgtgtatgtgcatatgtgcatatgtgtgtgtgtatgtgtgtgtgtgtggtgtgtgtgcgtgcgtgtgtatgtgcatgtgtgtgcatgtgtgtatgtgtgcatttgcgtgtgtgtatgtgtgtgtgtgtgcatgtatatgtgcgtatgtgtgtgtgtatgtgtgtgtatgtgcatgtgtgtgcgtgcgtgtgtgtgtgtgtgtgtgtgtgtgtgtgtgtgtgtgtgtgtgtatgtgtgtgtgtatgtgtgtgtgttgcatcccattcactatgcatcattaacggtgctaaattaaaatagaaacaataaacaaaaaacccaaaacaaacaaaatagaccccgcccttcaatacctgagttctttttcatccacatcataacacctccaatgatacaaactaagatcacagctccgaggacagcaccagcaatggtcatgatggtgatggttgactgaggaggctctgggagtcaagagaaaggaagggaaggtgacagtcagggctcagctatcaagcctcaccctgcctaggctctgcagaaggcttcaactttcctgacctcagttctgcaccgcctccctcttaccccatctcagggtgaggggctcaggcagcccctcatgctccacatggcatgtgtatttctgctcctctccaacaggcacctccacagctgcccacttctggaaggttccatccccagaaggtctggtctccaccagctccatgtactgtgtcagttcctcctcatccttcatccaggtcagggtgatgtcagcagggtagaatcccagggcccagcacttcagggtgactttaccttcaggtctggggtgatgggtcacatgtgtctttggagggtctaaggagaagagttggagagttcaggtgttttgtcggggactccagcagggcccctgtgaccatcctttgctgggtcagaagtggggtgatggaggggtgaaatagaacaatagcacaggagctatttgggccatgcatcagcccaagtctcttcacagcacaggacacaatcagcagagggaacagaagtcacaataggaggaaacctgtgccagctggactgcagacaagggactagagccctcagtttacagagaactgcacaaactaaacaccaaggaactaacattgtccatcaacaaatgggtgagaaaagtgaatagacagttatcttaataaaagaaaaagcacaaacggccactaataattttagtgtgttcattatctccagccttcatgaaaatgcagactaaactacttagaagggctggagagttggctcagaggtgaggagcacttgatgttcttgcagaggacctgggttagatgctgtctgagactccagtcccagggaatctgactccatcctctgaccccagacaccaggtacacacgtgtgcacaatcacagtgcaggctaaacacacatccccattaacgaatgaaataaaaatgaaagttaaaactgctttgtgatagcacctcacccagtcagaatggctgtcaccaagaaatctgacagcaaatgctggagaggacatgtgaaagaggagctatactcactcctctctctctctctctctctctctctctctctctctctctgtgtgtgtgtgtgtgtgtgtgtgtgaatatgtgtgcacgtgagcacatgtgctagtgtgcttgcacaaaaattaatacagtcgttgtggaatctttttctatatttccaaaaaaattgatcatagaactaccatatgaaacacatattttattcctggccagatgtactcaccctaatggtaagatatttataccccatggtaattgttgatttattcactaaaaattggatttaatctatgaacagatttgtagataatggaaatttggtacatataaaatggaatactattcggctctaaacaatgtaatcacaaaatacacaggaaaatagatgaatttagcattacaatattaagcgagctcacacaatctgagaaagtacattgtctttcctcatatgtaacatgtagccaataatacatgtacatatgtgcataagtgtacacatgtgtccagtatagcatgaccaaaagacaacgagaaaggctaaatattggggacgagaaaagactgaatacagctactgagttttgaaacaggctataaaactaattgttttctagttatatatttgtcatggattttatttctatctttcttcagttttttgcgagttggtgttggataagtggatgaattgtatttgatgaggaatgtgtaaaattcctgtgacatacggctaacataacagcattcactgagatgtatagcctttgtttctagttaattttagagtgcgactttttctgtaataaatttaaaaaattaaaaataagtagagacaggggcgtgaccccagctgaagggggtctcttcttcctcaggactgagcccattcgagggcagagggaggagttgcctgtggcccctgcacctgtgcgcagcagctggtccttcccgtgctccaggtgtctgctgagccactccaggcactcgccctccaggtaggccctttgatgcagtgcaacaccagcctgctcccacttgcgcagggtgatctgtgctgccatgtctgctgcagtccacgtcctcaggtcgtcgttcatggcgatgtaatcatcgccatcgtaggcgaactgatcatacccacggaggaggcgcccgtccgaccccatgtgacagccagacagccnnnnnnnnnnncctccccccgccacaacatcatctgggcctctcggctccacccaccgcgaccagctcccgcacctgtcctgcccattgtccccgcccacccttggactcctctaaactgaaagagaaagatggttcccctccctatctctctgaaccagactctctgcatatcccacatttccagaagaacctccacttcttgggacccggggcgactctggaccgtttgtagggacgtaaaggtcgggacctccgacccggggtcactcaccgcccttgctctggttgtagtagccgatcgcggtcctcaggttcactcggaaaatctgctgcctgtccttggctctccgtgtgctcctctcccaatactctggcccctccctctccatccaaggcgcccgcggctcgtatctcggattctcggcgtcgctgtcgaagcgcaccccggtgtctctgaaccgcccaaggccaactgcatgacgatgccaggtaaaatacacagaacacttaaaataaatgttcacggaaacaggtgctgtcgcagtcccggtgagtgcgtggggccgccgtggacactgcatggaggtgactggagtttttacagctctggtcaagtccttctgacacactgtgtcatatgtgactctccgtgcaggaaggagtccctactctcctctgctttcactttcttcttaagttatgtgctgctggggtttggagacatcaagtcaaatctacagaaacaaaaaactataaaattaatttttctcctctggcctgaggaaccagaagacaacacgattatgaaatccgatgtcccacaggcctgggacatttgtctccctcatgtcatcagctcataaagtgtgagtgaaggtcagagagagagagagagagagagagagagagagagagagagagagtgatagagttacaggttatgtaacttctaccacggtagtttatagttagttacagttcctctcttactgtggtttattcactaaagcaatcgttccatgaaagtgtgtgaacacatggaaatgtggagtgtagacaggatcaatgacctggtgtatttggtctccatgggtttctcttcccagtggagaaggggtccactgtgctgagacaatgacccaggtccacacagacaatctcaggactatggaatgatgatccatgtaaaacacaaccaactggagtcacagatgattatctgggatgaaacactaggagtctgagtgtaagcacaaggctgtatagacagatcctgagtgaagagcagagtctctatttacaggggagattcctgagcatcaggcttggcagtgtgagcgccccctgcaggtggacacaggagcctggtgtatgtgggagtctgtgtggtgcttgcaggccagagcctctactttaaagagaagcatctctctccttcatcccacttttgccattgtatttccggaagtgacttttctactgggaggtccagggtctgacttctgaagagaagaaggaagaggaagggtgaggagaggaggaattgttttgggctttgggtctctgctagtgttttgggttttttttttttttgtttgtttgttttgttttgtttttgagacaaggtttgtctcctcaggtctggctattctgaacttactgtgtagacctggttggccttgaactcacagagttccacttacctttgtatcccatgtcctgcgtttaaaggtttgtgtcaccacacctggccttagttacttttctatggctgggataagacactgtgaccctagcaacttataaaaggaagcatttaatttagtcttaacttttcagagggtttgagtccatgatggcagaggaaaggagtggtgacaggaacagctgaggctcacatctctatccacgaacaagtgtctgagacactggggattttttttttttgaggtaataatggaaatgtaatgttatatgttcatacagaataatctaaaagcatgataattgattacacagcagatgatatgccaaaaatatagtaagttttagaaaagggaactacttgtttttttttttcatttttaaaaatttgaattagaaacaagattgttttacatgtcagtcccagttcccactccctcccctcctcccctacccccccaactagcaccctacctattacatatcctttctgctccctagggagggtaaggccttccatagggggtcataagagtctatcatatactttgagatagggcctagacccacccccatgtgtcttggctcagagagtatccttctatgtggattgggctcccaaggtccacatctatgctagggataagtactgaactactacaagaggtcctgtagatttctgaggtttcctcactgaaacccatgctctggggtctggattagtcccatgtaggtaactcagctatcagtctggggaccaagagctccccgttgttcaggtcagctgtttctgtgggtttcacaagcttggtctggacccctttgcccatcactcattcttctctgcaactggattccagttcagttcagtgattagttgtgggtgtctgcttatacttccaccagctgctggatgagggatatggggtggcatataagtcagtcatcaatctcattatcaggagaggacatttaaggtagcctctcctctgttgctttgattgttagctggtgtcatctgtgtagatctctagacatttccctagtgcctgatttctctgtaaccctaaaatgtctccctctattatggtatctccaatcttgttatcttctattcttcccctgactcaacctttctgctccctcatgtcctctgcatccctcctcttcttcccttctcgttctcctagctccctcccccagtgggaatcttttaatacctcaatgcccagcccagtgaaacacctcctccaacaaggccacacctctgatccttcccaaacagagctggggtatctggagctgaagtatctgaacctctgagcctgtgtggccattctcattcaaccatcacagtattcagtgtggaatgtggatgccctgcagggctctgcagatgtgtccctgagatctgtagacagcaccctcaaacaggagttctccactgcattaggatctctgctttcttctgtcacctcctgcccagcccttctgtgtctcctcaggcatcaacccttcagtgcccagaacccctcattcaagctctgcactaacctttgcatccagtttctatggctagccatcttgtcagctatcttgctatgaaccaggttgtgtggtttccttctgtaaaattccaataggggctggagatacggttcacaggttatgagcacctgttctgttgaagagaattcatgtttagttcccgtcaaccgcatggtgcttcacaaccatctgggaatccagtttcaggtgatcctggcactggatcactgcatgcatacatgcatacacacatgcatacatacataaaatatacatgcatctaataaaaatacacatatgcagacatctaataaaaataaaagtaaaactacattttaaaagtgctccaaggctccctctcctacacatgtagagtgtgacacccagcatgagggtacagggctgtttagttaccattgaaccaccaattagtgaagtcagagctggaatgagacaggcactgatgactgaaatagactgtgctgaaatgagcattagcaaaacagtataaagttaaatatacaggaagatttcattttatggacatactgtgcacggtggatcacaacctcattccaggaagaagacactgaatgtgctcatctttgcacttgagccctgtgttggtttttaatcgctgctgaacaagatacactccagtcaacacttgaatgataattgtaagagatcacaacatccccaacatccagaaggttcctgtagctagtgacgtccccgtcctcatcctccctcccacttcagcccttctatgatctgtcttttcaagatcaaagagaattattagcgtctagggcaagagccccacctggggaagaagaaacaggactgctctaagcccacataggataaagctaaagggggatcatgtctgtctgagaggtcacaggcccctatctatacaactccaagggtcttgggtctgaggctgtgctgcccttgtcaaaccttcagcccgatagaactttctgtccttttccacctgtgagaagaaaacctgttgtaagagggtagggaggaggcagagccatgaggaccaaaaggacctgaaaagcttgggaccagggaagtttccagaactctgaaacagaataggacatctattcttggttgtcaacctgagcatatctgaaattaactaacactgaaaaatggaggacacccctgtgagggacgtttgcttaatttgaaggcagaaggtcagtttctgatctggatctttgtggtaggaagacacatcattaattcagatcttttgagctggaaaaacccatctctaatctgggccacacctgctggaagtccatacaaggacgtgaaagaaggaaggttttctcttgacttgcttgatcacacttcactagcaagtctattccttccctggcattagagccgacttcctcaggattctagtgcatactaaaggccagctgagacaaccagcctggtggactgactgagcaactacttgatttttggactttttatttatagtcagacattgttggattagctggaccacagactgtaaattattctaattaatcccctttctatagatagatacatagatgcacagacagatacatagatgcacagagggatacatagatgcacagatggatacatatctagatagattcagtctttaagttctgttacactagagaattgtgactgtgatggtgacccaggaaaggctgaggaaacactgggatgagatatggaggaagaaaaccaaatgccctcctggagaactgtcctcagtgaacacctatccctccattctctgactgctgtgacccaagtcccatctccaccactggggtgtcataagtctgtcctgtgtcctctcatgtgctttaccataaagtgtctgcaagctgagccccaggctgggtgagcaccttgtgggatgctacactcataatcccaagtcccattcctgaatactagagactcgaatattggaatctctcaagaccaacctctccaaatcataaaattccaaagtcacagcctaaaataaaataccaaatgtttaagtctgctaaatcaaattccccatgagtacagtccccatggtgtggagggtgttactgtaagaacacagaaagccaagttctagaaaagccttgggcacacagcacagctcctttgaaaaccttataaacactcatcattctctacacgtttgtttcttccatctgatgaaagcccagagcctttgatgaaccaaaacttccctagtctgaagatgccggtgaagttagtgttggcatctgagtctatagcaggacctgtgtgtaccctttctggccatgtgaccactagtatcaaatctgcccagcgtgtggtctggatgtgagcacatgcagagtagattccctcagggaagcctggcccagcagatgggaaaggtgggcagggagctcatttctgggtgtatcacattacaggagaacttgataaaacctggcgataaagaaaattatcctgaacccgtggtctggggaaagccaggtgctgagagaaaaacaaccctgctactcatgacaaccaaaacctgagagtgcagttaatgatcctgaaggtctgcagactcagcacatttgctctctttagcatagtgtgcaaagtagatgttggtgctggcttaaatcccagcactcaggaggcagaggcaggtggatctctgtaggttcatggtgatcttggtctacagagagattcaggacagatatggctacatagagagactctgtcatagtaaagcaatcaatcagtcaatagatcgattgatcgattgatcaatcaatcaatcgatgtatgcaccaatttacttaaatctgggaattttacaagtcttaattccctgagacaggaaatcactatcccctccagcactgtgcccagcctgtccccagttctaggagtgaagaacccataacacaatccccaaggccaacctaggagaaatgcagatctgcacactgacagggggaacctggaccctggctctgggaccaagccacctcctcctgctccccatgcctcctgtgcctggctcacctcactgaaaccaagattgccacctgcagtgacgatggcacagatgataggatgtgatcttctctgacagctccctattgtagcacatgatctaataggtcttaataataaatacacagtggcagatattaggggattaaaactgaaagattagagaagcaaaaacagccagtcactacctcttacctctacctcagaccaaatgggccatcctgtctccatgagtcctcagaatgaatgctctatctacaaaacctcacactgcaccttcacactgcaccttcacactgcactctcacactgcatcctcacactgcatcctcagactgcaccctcagactgcatcctcacactgcaccctcacactgcatcctcacactgcaccctcacactgcatcctcacactgcaccctcacactgcatcctcacactgcaccctcacactgcatcctcacactgcaccctcacactgcatcctcacactgcaccctcacactgcatcctcacactgcaccctcacactgcatcctcacactgcaccctcacactgcatcctcacactgcaccctcacactgcatcctcacactgcaccctcacactgcatcctcacactgcaccctcacactgcatcctcacactgcaccctcacactgcatcctcacactgcaccctcacactgcatcctcacactgcaccctcacactgcatcctcacactgcaccctcacactgcatcctcacactgcaccctcacactgcatcctcacactgcaccctcacactgcatcctcacactgcaccctcacactgcatcctcacactgcaccctcacactgcatcctcacactgcaccctcacactgcatcctcacactgcaccctcacactgcatcctcacactgcaccctcacactgcatcctcacactgcaccctcacactgcatcctcacactgcaccctcacactgcatcctcacactgcaccctcacactgcatcctcacactgcacccacacagtgcatccttacactgcatcctcacactgcatcctcacactgcaccctcacactgcattctcacactgcgccctcacactgcaccctcatactccatcctcacactgcatcctcacactgcaccctcacactgcaccctcacactgcatcctcacactgcatcctcagacttcctgtctccttccaccttatattcctttttctgcccagcaatatcctcctgtctccatctctctagagctgggattaaaggcatgtcatcccaagtgctgggatcacctttgtgtgagctctgtttctctatagacagattcaatttcatgtagcccagggtgtccttgaactcacagagatctgtctgcctttgtttcccgagtgttgtgattaaaggtgtgtgtccccactgcctgggctctgtggctaactagtggcttagttctgcactctgattttcagacaagctttatttgttaggtcattaacaaagtatcaccacaccctatggtgtaaggttctactctctctgtcaatccataaacaggctgaggactttactcagtattttctgaatcacagaatggatctgtggttggttccctggatctgtcacacttgggccaacatcagcctcctccttcaatgcctgcagttgagtctctttcctccattggttcctgtcagctgcagctgctccctctaccactaaccctgagccctgcatggatttttcagaacctgagccctgggtggcatttgacagggtcagggtttccctgggttacagggttatcgatgaagcagggatggtgcagggaccatctcagactttggaacctgctgacccactgtgtgcaaagctcacagctgctgcctaagcggtgagaaccgcttgaaggtgctcgatgaccatgcccacagcctgcaaccctagctgacccacccaggactttcactttgatctttcacagagtcatggagtctgtgatcctcaccctggcagtcacttcaggatctacagactctgagaagctccggtatttttggcccctccatggacgtctgcaggggctcagagtttctgtgtctttactgcatccacaatggcaccagtcatccagaaaggacagtggagggaagaaaaggaatttaaggtcaagcaggagggaagctaagggtgccttgaatgcttagtgaatgagtgatgtcaccagcagattatggggagccccatgtgcaccccaaaacctgtgtgtacccactgaagctcttctcttttgggtactctctgtgccaaagaagaaatcttgtgtgcaacactccagtgggacaagtcttctttgatgtgacaggagcagggtctctggagctggccaacctggggagtcccccaatgaggggggacaccaggagggcagagcctggcttaggctgtccgaagtgggaggatctttcttctcttacctcaatgccatgctgtaacctgacctaatgaaagcagtccctttgaggttgggagtgggccaggttactctgagtttgtactaaagtgctgtgggtgagctctggcaggggttggaggtgttgaccatgctgagaccctcaagttgtcagttgtttgggatcctgcccttccttccaggttttatttcaagtatcccattccctaagatcaggactattattttcttttgattgagacagggtctcactttgtatttttggctgtcctagaattcactttgtagaccaagttggactagaactcacagagatccacttgcctcttcctcctgagtgctggtattgaaggtgtgcgttacccatggccagccatgactgtttgttgttcatctgtttgtgctgtaactaaaaagcctttccaagggcaagaggagccaactatgtacaagtcagaagctcatctggctctccatagctgttacgataaatctttccaccaaaagccgctgagccccaccgccagagttaggcccaaatgaatacacagaaacttgtattaggttcaaaactgcttggccaatgactacgacttctcatctgctaactcagtcttaactatcataaacctatatattttataagacttatcttatcagacaccttattggtgtccctccttgctgggatcataccttgccactggagcaggagcggaggggaaaaagagacgcttcctgtttctccttcgcttaaatatgagtctccttgctatgtcacctcctgcctggatcacacttctctactacatttcccagaatcctatttgactcctagccccttctaacttgctctctcattggccaaacagtattttatttaacaatcaataagataaagatacaaagtacattccccatcacatagcttccctttctctgtgtcacgtggacttggatggaccttggatattctaagggccttgttctgaggtgacatctctatcctagggaagctgtgggaggattccttcagggagtccctgggagagagaactctgatgagggccagagccattgctgtcctctttccactttttcagctaacacacttgctgcacaggcctgaccccttgagagtcatccatggaacccacctgtgggaaggagagagccaactaccacacgttgttctctgacctccacacacatgccatagaatgtgtgtacccctacatcatacacaacaaaataaaatcctggtggccagagagtccactctgcttaagagcaagaattcagtgtctgcagtcaggtgactcacaatggtctgtgatgctagttctgtcctccatgtccatgcattctcagggacacaaccacacaggtccatatatgcatataattaaacaatatcaaccaggcatggtggcatacttcctccaggacagtctgcagtactgcctgctgctccagcctctccctgtcacacccacagttagtccaggaggaagaactgtgatgtcatctgcagagaggacccagaatgcctcacttcccatcctggtgacctcacaggggacactggagtgtgcatcaggagcaggacactgctttccccaggtccccactgtctgcctggctcctcccctgctacagttccctccagcagatcctgttagaagaggaattgtgcctctgttccctctgctcaactgttctaactcctgtcacactgtgaggacaagtctgtgttgtgtgacagagtgtccctggaaagacacacacacacacacacacacacacacacacacacacacacacacccattcatctcagttagggaactcatagctgacaaagtaaccattgcatcaatgcccatattggtgagccagtgggttttattggggtcaccaacatgtgtgtgggagaggggttactcacagggacaggaataactgactgcccacagggcatcactgaaaagcccaccccaacacaggtaacaactcatggaacttcctccctggagctctctgcacagcttccaggcagctagaaagtcaaagaattctctccacagctggatggtcagtgtgctcccccaggacatgttactccttgtcatacatctgcagagaaatcctagagagttgtcagagtttctttatataaaattattttattttacatacatgggtgttcatgtatgtatctgcaccatgtgtgtgcagtgcccgctgaggggagggaagggcttgaatcctctggaactggcgttacagacacctggaagctgggaatcaaacccctgtgctctggaagagcagccagtgctcttccctgctgagccatctcgccagcccctcttccaacttctgttctcccagacacatgaccttgtgttactcctgagtgtcagtggtgtccctgtccctctaggagagaatgtttcaactcagaaggaactgcaatagaacagttggacacttccagcattctcctggcctcattgtgtagatagccagtgactctgctccaggcatctgcttccttagtcttctcagaacacacagccatgctcctgcctcagcacatctgattgcatcacccacagcttggaaggaatttgcttcaacagtctttagaatgatttcttcttcttttaaatacatttttatttattcttctctcatacaatacactctaactgcagcctctctccctcccagtcctcttttctctcccagattcactggccctttgtttctcttagaaaagagcagcctcccagggatatcaaccaaacagggcataacaagatgcaataagaccaggcacaaacactcctctcaaggctggaggttgaggcaacccagtaggaggaaaagggtcctaagatcaggcaatagtcagagacaacctcactcccactgttaggatgttacaaaaccccaagccaaacaaccacagcctatatgcagaggtccaagttagtgcagacccaagcaggcctcattgtagctacttcagtctctgggagccctgagagccctgcttagttgattctgtgggctgtgttctcttgtcctcacccctctgtctcctgcaatctcttctggccctcacccataggagtccccaaactcggcacagtgtttgggtgtgggtctctgcatctgctcccatcagctactggatgaagcctctctgatgatgattagactgggcacagagatgtgagtatagccgaatttcattaggaatctttccatcgactttttttttatcttgtttggtctctgagcctttcagcttctggtgctcagccatccaggcagtgttaggcatgggttccctcttgtgaccagggcctcaagttaggccactcccattagctctgagccaccattaccccagcataccttgcaggcaggataggtgtggccaaagattttgtggctgagttggtttactggtcccacttctgggagccttgtcaggtaactggagatggctggttcaggttccgtatcctccgttacttggagtccttgctagggtcaccctcagaggttccaggaagtttccactgcactatgtttccacattgccctccaaatgccctccttccagttgtctcttcctgttctctctccctccatccctccgtttaccgggctttttcttttgggccaccaaccagctcccaaatcataatacagacacttcttattagttatgaatgctcagcccatcttaggattgtctggctagctcttttaacttaaattaacctgtttctctttatctacattttacctcagggctttttatctttctgtatatcttagtttcattgcttctcatgtctggctggcagctgcctggcttctggccccaggcatgtccctccatttctccctcattctcccctcttctcctttctatttattttctctgcctgccagcctcatctatccctcccctgcctggctattggctgttcagatctttattagaccaatcaggtgccttacttaggtgaggtgaaggaaatgcaacatttctttacataattttttaaaaaagatttttatttatctattaggtacacagttttctgcctgcactccaccagagggcaccagacctcattcaaggtggttgtgagccatcatgtggttgctgggaattgaactcaggacctctggtagaacagtcagtgctcttaaccgctgagccatctctccggcctttctttacataattaagcacacatccttacattgttaaacaaatgcagcataaagaaatgtaacacgcctttatgcagttaaagtgatataccccagcataaacaaatgtaaaacaacttggcacagtaaaaataatattccacaagactttcctgccccacgtgatccatcatcttcccattgccaccatacccagtccacccacaagatctgttctatttccccttcccaaagagatctatgctgcccccagatccctctttgcactcagcctcacttggactgtgcatgctagcatggctgtcctttactttacagctaatatccacttatgagtgggtacgcgtctgtttttctgggtctggaataccacattcaggatgattttttctggttccatgaatttttctggaaaatttcatgatgtcattttccctaacttctgagtaatactccattgtgcaaatatacctcgttttctttatccattctttgttaggggacaccttggttgtttcacagtttctgactgttatgaataaagccactatgaatacagttgaacaagtgtccttggggtaggatagggcatctcttggatatatgcccagagtggcataactgggtcttgaggtaaatagattcccatttttctggggaacaaccacattgacttccatagtggctgtacaagtttgcatttccatcagcaatggaggagtgttcccctggctccacatcctctccagcaggagctgtcacttgtggtttcgagcttggccattctgacaggtgtaagatggcatctcagagtccttctgatttacatttccctgatggctaaagatgttgaacatttctttaagtgcttcttagccatttgagatccctctggtgagaattctctgtttagatatgtctccaattttttagattggattatttggttttctgatatctagtctcctgagttctttacatattttggataaaagccctttatgggtgttgagttggtaaaaaaaaaaatcttttcccattctgtgggttgctgctttatcctcttgatggtgtgctttgccttacagaagcttttcagtttcataaggtcccatttattaattgttgatctttgtgcctgggctatcaggaagttatctcctgttcaaatgcatacaacactattcactactttctcttctatcacgtttcagtgtgtctggttaatgcggagatctttgttccacttggatttgagttttgtgcagagtgatagatagggatctattggcattcttctataggcagacatccagttagaccagaactatttgttaaagatggttttttctattgtgtattcctggcttctttatcaaaagtcaggtgtccatagatgtgtgggtttatgtctagggctttgattcaactccattgatcaaggtgtctgtttttatgccaatgccatgtggttgttattattacaactctgcagtacagtttgaaatcagagatggtgatacctcagtgagttcttttattgtacagaatagtcttggctatcatgggtttgttgtttttctgtatgatgttgtgtagttttctttcaatatctgtaaaaaattgtgttgaattttgatggggattgcattgaatctgtagattgcttctggtaggatcatcatttttactgttagtcctacatgggagatctttctatcttccaatatattttccaatttctttcctcagagacttgaagttttgtcacacaggtctttcacttgcttagctaaaattaccccaaaacattttatattcgttgtggctattatgaaggatggcattttcctatttttttctcagtgtgtttatcatttatatttaggagggctactgattttttttttttttagtcttgtatccagccaatcactgaaggtgtttatcaggtgtaggcatttcctgataatttttttggggtctcttatgttgaacaaatgaaccttaataactgctgcatcattgggatgtcctgatccaacatcgaggtcgcaaaccctaattgtcaatatggactcttggatagtattgtacccttatccctagggtaacttggtcagttaatcaaaatgttttgagtaaataagattttgatagttggactggagagaagactcagagtttaagagcactggctgctcttacagaggtcctgagttcaattcccagaaaccatatggtgactcacaaccatctatagtgggatctgatgccctcttctggcaagaagtcaatagagcactcatataataacataaataagtaataaaacttttttttaaaaaaaagattatggggctggagagatggctcagaggttaagagcaccatctgctcttccagaggtcctgagttcaattccaagcaaccacatgatggctcacaaccatctacaatgagatctggtgccctcttctggtgtgcagatatacatggaagcagaatgttgtatacataatagataaataaaatctttttaaaaaaagattatgatagttactttgatttgtgactcaacgttaaaatcatttgaagggttttttaataccccaaggacaccctaattaaaatttgtaattttaaatattaatccaatagaaaagttataatcaaaatttaattaattaaagttccacggggttttttcagctcattggtttatttctgcctcttcatgacaaggttaatgacactgattagaaataagagacagttgaacccacatggaagccattcatgctagtccccaattgaggtacaagtgattatgctatgtttgcatggttgggtaccatgactctctaaagtcagtcactgggcaagcaatgcctctgattcttgtgatgctaaagatgatatttttggtaaacaggtaggtttggattttctgatttctttttatttcttttaatcttttttttgaagcactcctgtgttgggtgacatattaccagtaggtaggtttatggggagggaaaataactttaagattgctaacatggttatctaactcgttataagcttgtgcagggagaataaaattcttgtcactcatattaacagtatttcatctctatatagattaacccaattttaactatagcaatcatgttggacattaaaattagagtgcttgaagtatcgagcttgcacactttcttgattggtggctgcttttaggtcaacaatggttttggtattaagctttgttcactattaaagatggtttccattcctaaagagctgtcacttttcaggctatgttttaagttttccttttgattatatgtttgcagtaaacttagatttgaactgaaagtcatgctaacacatcattggcaaataatgatactttgacttcttcccttcttaaagaaagcaaggaaaataacacagcaaaaactgtataaaatgagtaaatcccttaaagaaagtcaagaaagccaagaaaaaacagacagttgacagaaaaaataaaagtgttcaagacctgaatatggaaataaaagcaagaaagaaaatatgaactgaaggaattctggaaatggaaaatctgaactctactggaactacagatgcaagaatcactaatagaatacaagagatggaagagggaatctcgggcattgaagatacaatagaagacatagatacatttgtggcagggtcccatagctgtttagtcccaaataaacacactgaggcttatattaatgataaactgcctggctgatggctcaagcttcttattagctagccctctctcttaattattaacccatttctattaaactatgtattgccatgaggctgtggcttacccctaatgctctggcatgttaccacatggcatctacatggcatctctctctctttgtattcctctttccagcattcctagtctggtagctctgcctatacttcctgcctggtgacattctgcctgcccattggccaaacaggtttattcatcagccaataagaaaaacttatattcgcaacatacaaaagaacatcccctaccatacattggtcaaagaaaatgttaaatctaagccattcctgacccaaaacatcagggaaatctgggacactatgaaaagaacaaacctaagaaaattaggaatagaagaaggagaagaaacccagttcaaaacccagggaatatatttagcagaatcatagaagaaaattttcctaaaccaaaggagatgccgttaaagatacaagaagcatacagaaaaaaaaaaatagccgagcgttagtggtgcacgcctttaatcccagcatttgggacgcagaggcaggcaaatctctgagttcgaggccagcctggtctccacagcgagtgccaggataggccccagagctacacagagaaaccctgtctctaaaaacaaacaaacaaacaaaaaagaagcatacagaacaccaaataaattggaccagaagaaaatcccctctccacatagtaatcaaaacaccaaacatacagaacaaaataggaatattaaaaacttcaaaagaaaaagagcaagtaacctttcagaattatacttgacttttccatggagactgtgaaggccagacaggcctggccagatgtgctgaagactctaagagaatacaaatgccagcccagactactttacccagcaacactttcaatcaccatatatggagatagcaagatatctcatgacaaagtcaaaatttatactaactatctacaaatatggccctagaggaggtgctggaaggaaaacccaaacctaagaggattaattacacacatgaaaacacagcaaataaataatctcacattagcaaaacaaaaagaaggtaaacacacacacacacacacacacacacacacacacacacacacacacacaccaacacagtataacaggaattaatgtcaccctctgaacgaagcttcactgaaatcctatttaaactcttaggggtggggagatggctgagatgccgacaacacctcctgctcctgcccagagccaagttcagttcccacacccacacccaggtgctctgacaccctcttctgacctccaggacctccccactcacctgactactcacatggatgccacacgtcccctggggtggattccctgagaaatggcccccataggcttgggtagttgaaatttgttccctagttggttgcactatttgggaaagttgaaccctaagttgtgtggcttgctggaggaggtatgctcctgaaggagggctgtaaggggaaagctccatctgcctccatttagctctctctgcttcctgtttgcaactgaggatgtgagctctgggcttcctgctccagtccccctgcttggggctcagggcactgctttcctgccatgatggtctcttagccagtagaagtgtagcccaaacaaactcttctaaatgttgccttggccatggtgtttcatcacagcaacagaaaattactcatacgtacacatgatttttaaaaatacttttactttgtagaccatgttgatcctgaactcccagaaattcaccagcctctgatttcaaagacctaggcaaaaaaaacaaataacctaaaaaacaaacaaacaaaattccacaatatatgttttaaaggcaataactctctgtcctgttctatacacttgcactctgggcattttcccttttgccctccaactcctgagacagcctgtccttgtttattcccttacactgtatcataggcatcttcccacaacagtgattgctgcaggagaccagcaacactgtatcacttcctagtgagtctcagaaacagggctttctggaacacactctgtgagctgatcacagtggacacggctgtgccccctgtttgaggagtggatttcctccactccagatggagagagtgacagcagaccaaggaaaacaaccattaccatcagctcagtgagccctgagctcactggtcactcacaggagcctgagtgagtccggggataactactgacatcccacccagtgtgcatgtcactcacacagctgcatcactgcagtccccagcacagctcctcaacagtctcctctccctcagggaccacagctggtttagccctgagagggaagtgctacattgtgtcagctctgtgaacctgtagcttcttgtgtttcttgagcctcatcatccctcacaagacaaagatggctgcatcatgacagagatagtcaccttcttggtcatcagacatctctgctaaggctcctggagatcctgactcaagtcacaaggctagaagagaaaccacaggggccagaacctggagcaggggatgaagtaatttccatctctagcattcccacaatctattttttaaagatgtattaattttacatctacgagtgtattcttgcctgtgtatttgcactatgtgtctatctggtgctacagaggcatttgatgctatggagcaggacttttgagtggttgtgagctactgtgtaggtgcaggtatgtgaacctggttcctctgcaagaacagcaagtgctctgaaaccctgagccatgcttccttcagtccctggatcatgtctttttaaaaattatttatttaatttagaaacaatcttattttacatatcaatcccagttccctctccctcccatccaccagtgccttccaccgatccccccatcccacatcccatcactcctcagggagggtgaggccttcgatgggggattatcaaagtctgtctaatcattttgggagggctgagagaatatcccttcatggggaatgtgctaccaaagtccatttgtgcactaggaataaatactggttctaatgccagaggttccataggctgcccagtcttcctaactgacacccacattcagagggcttggttcggtacaatgctgcttccctagctttatgtctggagtccacatattctcacttggtcaggtcagctgtttctgtgggtttccccagcacagccttgactccttggctcatccctcctccctctctacaactggattccagaagtatggctcagtgcttagctgtgggtgtctgcttctatgtccatcagctacaggatgaaggctctaggatggcatataaggtagtcatcaatttcattataggggaagggtatttaaggcagcctctccactattgcttagattcttagttggggtcatccttgtggatctttgttgatttccctagtgccagatttctctttaaacctataatggctcctatttaaggtatctctcttcttgctctcctctgtacttcccctacacagacttacttctccctcttgttctcctccacccttctcttctccccttctctttctgctaactccctctcccccctgtgcccccaattgtctcaggagatcttgtccttttcccttctctaggggaccctgtatgtctctcttggggtcctccttgtctcctagcttctctggaggtatggattgtaggctgtgtagggactcagtgtgcatgtgcgagcttccccttttaaacccatagcattattctcctctctctctttttctgtcagtcaacctctctctctctctctctctctctctctctctctctctctttctcccctctcttctctcttattctcttccctgctttgttcttccatttctctctcttcccctctccttctcccaccctataataaactggttaatgtgctctctatatttccatgtctatctctcgacttctaatttaagcaaaagaataacactgtccacacaactccaagggtctcaggctgtccttccctcatcaaacttacagccacaactgtagggacccaagtataatatttcagaaagatgctctgcccagccataaattctaggagctaggaagttctattgtctttgtcagttggtttcctactgatggcctggattcagagaggaatttctcctattttgtataacaaaagacctaggcctgggagagtctacccccaccctgaaggctagtgagacttgctggtgtggagtgtctgagggcttgagtacctgctgcttaggagtgtctctagggttagaggaaatatttcctattcaaccctttatacatgataatagatgtcttctgccattgcccccacttttgaatacattaatatgatacttgaataaaccatggtctccagtactgactgagagccctcctgttatgaccacatgtctctgtctcatcctcagcatcattgggtagctaggccttccctcatccacactctcacactcagagtcagacctggagctgtttggctggttctgattgcagccctgaacagatcagtctggaatagatgttccctgcagtgtgggactgatacaggctggatcctggcacacaagggactttccatccttttccagctgtgagaggaaaacaacttgttttctttttttccaggtaggaggcagagccatgaaaaccaaaggaggctgtgaagggaccagccccccattcccgcagccatgacagtaacacgtgctcgctatgaccttagtcactagaggttaggtgcctgcctcgtgacaaggaaccaatcagaagttagctggtggcgctatgctttatgaccctgggtgtactttacgggtaagtacacagcaatgacgcacagagcataacaaccaccctgggagggcctatgggccataacaaccagttggccaatcaacacagggcaagccctccaagcctggaggcacaccaattgtgagcctctgcgtacccccttacgctgccctataagatctctctctctgcagccggttcaagctgtcttttgtagtcaaccgccatggtgggtggacaaaagacccgagctaacatggggttagctcgttaaattacaataaagcctcatgcagtttgcagcaagctctcgaatctgcctagtgattggggtgatgtggtcgtggcctgggacccaggatacctgagttttccgggggtataacagctgcagagcctggacccagggaagtttccagaactctgagacagactgatgtctgttcttggttgtcacctgtactacatgtggaattaatagaaacacaaaaacagggatttctgcatgatttgagatgatttgcctaatttgaagtgggaagttcaacttctgacccggatctttgaggtgggaagataacctttaatccagatcttgagtctggaaaaaccacctctaatctgagccatgccttctgctgagagcctatatgaggacatggaagaaggaagcttgctcttcaagcctgctgctcttgctcttggtcttgctagtgaagggaccattttggcagctgtaacagccgaacacgtgcttgtctgaccttgtcttagtcactaagaggtcatacacctgcctcgtggcaatgaaccaatcagaagttagctggtggtgctatgctttatggctctgggtgtgctttacagacaatgatgcgcagagcatagcaaccaccctgggaggtcctatgggccataataaccagttgaccaatcaacacaaggcaagccctccaagcctggaggcacaccaatcctgagcctgtgtgtacccctagacactccccttacgctgccctataagatctctatgcagacgctttgcagcgtctttcctagccatccgccatggtgggtggatgaaagacccaagctaacatggggttagctcgttaagcaacaataaagcctcgtgaagtttgcatcaagctttcgaatctgcctggtgattggggtgaccgcagtcctgggctgagatcctggaggactgagcttccgggggtcttacactagcaggtcctttccttcactggaattagagccagcttcttcagggtttagcatttactggagaacagctgagacatccagcctcatggactgaacaactattggattcttggaatttctgttcatggctagccattgttgcattaccttgaccacagcatataagtcatcctgatatatcctagataaatagatagacagatagatagatattcattaaatcagttcttttactctagagaaccatggctaacacagatttttataacagaagtggttctggagcaacagaaatataatgatgactcttttaaatatctggaagagcctttccaattttccaacacctacagctacaaagccttttcagttactgacacctgtcttgggagctcagagagcactgaaggctcatggtgtgtattttattgattccagccctgagtttcattatttcctgctgtctaccccccccaccccgagtttgtttcctattgttctagagctttcaggtatgctattaagtcatttgtgtgagatataggcacttaatgctatgaactttcctcttagcactgctttcatagtgtcccataagtttggatatgttgtgcagtgattttcattgaattttaggaagtctttaatttttttctttatttcttccttaacccagtggtggttcagttgagaattgttcagtttccatgagtttgtaggctttctctagtttatgttgttgttgaactctaattaaagagtccaataagatataggggttattccaatttttctgtacctgttgagatttgctttatgactgagtatgtggtcaattttagagaaggttccaagaggtgctgagaagaaggtgtattcttttgtgtttgggtgaagtattctgtagatgtctattaagtccatttgtttctttgctaagtttctgtctggcagacctgtccttgggtgagagtggggtgctgaagtctcacactattagtgtgtggggtttgatatatgatatatgatttaagctttagaaatgtttcttttacaaatgtgggtgcccttacttttggggcatagatgttcagaattgagacttcatcttgatggatttttcctttaatgaatataagatgtcctctatctcttttgattaactttagtttgaagtatattttgttagatattaggctagccatgctgccttgcttcttaggaccttttggaaactcttcccaacctttacctttactctgaggtaatgtctgtttttgaagttaaggtgcgtttcttgtatgcagcagaaggatggatcctgttttcatgtccattctgttagcctttttattgatgaattgagtccactgatattaagagatgctgatggtgattgctaattcctgttgttttttggttttggtggtggtgatggcagtgtgtatatttcctttctttgggttttactgttttgagattatctattgtctgtgttttcatggatggaactgggttccttgggttagagtttaacttctagtactttctgtagtgttggatttgtggataggtattatttaaatctggttttgtcatgaaataccttgttctctccatctatgttgattgaaaattttgctgggtatagtagtctgggctggcatccttagtcccatagtgtatgtgaaacacctgtccatgaccttctggagaagtcgggtataattctgataggtctgccttatatgttacttggcctttttcctttgcagctcttaaaaattctttattctgtatgttcaggttttggttattatgaggtaagggttatttgttattttccttttttgttttagtctgtttggtgttctgtaagtggcttgtactttcataggcatgtccttctttaggttaggaaagttttctcctaggattttgttgaatgtgttttccatgcctttgatctgggattcttctccttctcctatccccactattcttgggtttggtcttttcatagtgtcccagatttcctggatgttttgtattaggaatttattggatttatcactttctttgaccgatgtatctatttgctcttcaactccagagattctctctttcatttcttgtattttgttggtgatgcttgatctgtaatttctgtttgcttccccagattttccatttctagaattcactcctttgtgttttctttattgtttctatttcaggtcttgaactgtttccttcacctgtttgttttaccttggctttctttaaggcatttattgatttcttctaattttttgtttgtctttccctcaacttcttaaagggaatttttcatttcctctttaggagcctctgtcatctccatgaggtaatttttaagtcattttcttgtgtttcagttgcactggaatattcagggtttgctgttgtaggatcaccggattctggtgctgccccattgctctttaggttgttgaatgtattctgacatgggcatttactcatcctttcttctaaccattatggcttttgcctgtgtctcttcttccaactgttgtggtttgtacctgtgcctatgtagtctgctgtttttccatttggtgtggtttgtgtctgtgtagtctgctggggttgtggggggagggctgagcatggggagggtgttcaggtatgtggggttgggtaccagagtgggtcttggtgggccagcatccagtgggtggtgggagttggggtgcagcctcaaggccggtttctcacctgcctacagacaggctggtggagaatgcaccagagcagtggagttcgtccagaagtgggggcagcatccagctgccttgctggtactgcggtgccctagggttcagttaggatctggactttggggcaacccagttgagagctggtaggaacttttaagggggtgcacatgtcacacagctgatggtgaaaaggcacctggcaacagatcatgatgtaactgctttggtggtagaggcagctgctgctgtggtgaaaactaacactgggtcttattgccatttgttatgtcatagttagttgatatcactaggaggcttgctcctttttttttttttttttttaaacaagggggggggggggggcccgggggggggggaaagaggataagtgtggggagggggattgggaggagtggagggagagaaaactacaatcaagatgtaatgcctgtaaagaataaaaattaaaataacaaaacagattgcatcttacagacaagcattcaaacaagccacagtctttgtagctaaagaaggaagctgagagttcccatccacaatggtaaacaggaaacagagcagagcacaagcagatgggacttcttactttcatagcctttccccagtatcatacctcttctagcaaggccacatctctgaaacctcaacctccccaaataacatcaccctctaggaaacaaagttcaactatccaagcccatggggacatttctcaatgaatccaccacagtggatgtgtggaatccctgtgagtgtggtcaggtgagtgcaagggtcctggaggtcagagagggtgtcagagccctttggtgtgggtgctgggaactgaacttggttctcagcaggaattcccagcacccccatagcagctcacagttgtctgtaactcctgttccaggggattcaagctcctccctcacctcagcgggcactgcacacacatggtgcagatacatacatgaacaccaggcatgtaaaataatataattttatataaagaaactctgacaactccctacaattctttcacagctgtatgacaaggagtaacaggttatgggggagcacactgaccatccagctgtggagagaattctctgaccttctagctgcctggaagctgtgcagagagctccagggaggaagttctatgagttgttacctgtgttggggtgggcttttcagtgatgccatccatgggttgtcagttattcctgccccagtgaataacccctctcccatgctcctgttggtgaccccaataaaacccaataacccaatggctcaccaagctggtcactgatgcaatggttactttgtcagccgtgagttccctaactgaggtgaactggtgtgtgtgtgtgtgtgtgtgtgtgtgtgtgtttccagggaaagtctgtcacacaacacagacctgtcctcacagtgtgacaggtgttagaacagttgagcagagggaacagaggcacaatttctcttctaacaggatctgctgtaggaaaccgtagcaggggaggagctgggcagacagtggggacctggggaaagcagtgtcctgctcctgaagcacactccagtgtcctcccctatgaagtcagggggatgggaagtgaggcatcctgggtcctctctgcagatgacatcacagcccttcctcctggactaacggtgggtgtgacagggaggggctggagcagcaggcagcactgcagactgtcctggaggaagacagagtggccataggtgaagaagaggaggactgtcagggatgcatgaggagggccgtggaagcctcggtaggcgatgctgagctgagctgcccactagagatgcagggtgggtggttctcagacagagggacaaagggggacactctgaggacatctttgtgctggagaagacagtgggaggtgacctcagagtcatagtctttgagaactgatgaagcacccaggatatgaggcaggatatgagggtccaagaggatggggtcaagtgtaactgagagaggcattggatggtttaatgatttcttctctttttgagacaggatctcactgtgtagcccaggctggactggaactcactatgtagatgaggctggcctcaaacttataggaatatgtcttcctttgaccccccgagtgctgggattaaaggtgtgtgccaccatgcttggcttataatgtcaaattatttgcatatatagacctgtgtgggtgtgtgcctgagaattcatggatgtggaggccaaaagaacatggcatcacagaccattgtgagtcacctgatggctgacactgaatacatgctcttaagcagagtgaactctctggccaacaggattttattttgtttcttctttaaaataaattattattgtgtgtagcgtaggcatgcggcacacatgtgttatggtatgttcatggattccagatgacaacatgtggtagttggttctctccttcccacaggtgggttccatggatgacactcaggggtcaggcctgtgcagcaagtgtgttagctgaaaaagtggaaagaggccggactggaattagagccagcttcttcagggtttagcatttactggagaacagctgagacatccagcctcatggactgaacaactattggattcttggaatttctgttcatggctagccattgttgcattaccttgaccacagcatataagtcatcctgatatatcctagataaatagatagacagatagatagatattcattaaatcatacatagttggctcctcctgcccttggaaaggctttttagttacagcacaaacagatgaacaacaaacactcatgactggccatgagtgacacatgcctttaataccagcactcaggaggaagaggcaagtggacctctgtgggttctagtccaacatggtctataaagtgaattctaggacatctaaaattacaaagtgaaaccctgtctcaaccaaaacaaaagaatagtcctgatcttagggaatgggacaattgaaataaaccctggacggaagggcaggatcccaaaccactgacaacccgagagtctcagcatagtcaacacccccccactctcgagctcacccaagcacttcagtacaaactcagagtgacttggcccactctcaacctcagagggactgtttccattaggtcaggttacagcctgggactgaactaagagaagaaagatccccaccctgcggacagcccaaaccaagctctgccctcctggtgtcccccctcattgggggacttcccaggttggccatctccaagaccctgctcctgtcaccccaaagaagacttgtcccattggagtgctgtttacaggctttcttcttctttgggatagagagtatccaaaagagaagagcctcagtagggacacacaggttttagggtgcagatggggctccctgggatctgtggttggcatcactcattcaccaagccttcaaggcacccttagcttccctcctgctgtgaccttaagttatttttcttctctccactgtccttccaggatgactggtgccactgtggatgctcagaaactctgagcccctgcagataggaccattcatgtttgtttttttttttttcttgagactatgaggttgaaggaggattctaagacaatggctgagaatgaagggtaggtgggtgctatctctgcctctctgagctagcatagcatttggctcctgagtctttgttggaaatatcgaatgagtgagacacaagaaaaagatgacagcatcacgacagagatgatcaccttcttgggcatcagatatctctactaagtcttctggagctcctgactcgaggtcacaaggctaaaagagaaaatataggggccagaacctacaaccacagttagatactgaaagatgggaaaggagagaacttccagggagggtacaggagctcaggagactgaagttcatgttctcaggccacagtctctggagtacagggtactagttgggtcttgaggggacaagaatggaaaaacacattttaattctgtcacttggggaccacaagggataaggaggcaggtaccatttacaggaacaaaaacaggcctagtcctccgtacacactaaaatgacaagaaataaacatagaagatgggggaagagtcacagacggtttgggggccacactgatctgtcacagctgccctggctgctcataatcctggtgacaggacaaggctctggccatccctgtgtccctgtgaccacagatctcagcatgtggttctaattgatgaagaaaacagagccaggaggtgacacagttgaggagtgaccatgtcacagccaacaatggactgagctccacctggacacagccctgttcacacacagttcccacagcctgatctatcacaccagatacacacagctcaatgaacacagattctgggaggttctccatgctgcgtttatttccttcacaaaactctaagtattcacaatcatttaatttacctgccaaagtttgagatcaagggccggaaccattaagttcacatttagatacttattttcagtggggacatcaggggctgcagctcagggtagcatggaggtgacaggatggagatgtcccctcctgtctgctggaacagaaggtttggctgtggaagggaacacaggcagtgcaggaacagcgtcctgctgtgcagggctaggtagccagtttttcacattgagccctaagatcacagggaacattagacactgttgctgagagtgaactgaggggccatggatgtcacacgagagggctgaacactccatcccaccaggcagctgtcttcatgctacagaacaagagtcatgaactgaagaaaacatcccaacaacccaccactcacaggtgattatgggcatccctgaaacctaattgtgtccactttgccctcccacaccccaaatcaggtctcagagtgtcaccttcacagtctgggagagacacatctgagatctggacattgtccctacccagggataaatgtatgtatgtatgtatgtatgtatgtatgtatgtatgtatgtatgtataaacaggtccccagaagattttgctggaggagctattatggatttccagagctttacaaatactccagattcaccccaagggctcagggacaatcctgctccccacactggacagggagcatagtcccctcctcttccactgtgagaggaaaagctgtgagagactagggaagtctcctaccctaggaagtttccagaattaacagcaaacccagtttagagacaggagcaatgtgggtgtatttcccgtcaacgaggcagagcacacttctgaaaggtgtagcagaattctgctggcctgactccagagtgatagcaactggcccgaaccctcactgggccaacctggcctaactccagagcgctagcacctagcctaatctatcctatgtgaaccttgtttgggagtttaccagggatacaaaagcctatgcaaagcttggttcaggaaacccagtaaaaggtggcacctaatgaactgagactctgcacttggcattatgtttttggaagactcattcaagttgttctgagcatatggtgatcaactggctaaagtgcaaatacagaaaactaaaaatgccctgggcatagggaaattacttcagtccttagaggccagagtcccctgcagccaacataaggattaattcattcttatgtgtctttgagtcttcatcctggacacccgtgtttctcctcttcttcctcgaaacagccaccacagctgtaatgatggtcacaaggagaaccagaacagcaatgactgccatgatggggacagtggactgaggaggaggctctgggaagggaaggacaggaagggaagatgagggctatgaccccagctctcagccctgaccctgctcaggctctgcagaagactccagctttccctgaccccagctctgtaccccctccctccttaccccatctcagggtgaggggctcaggaagcccctcagggtacacatggcatgtgtatttctgctcctccccagaaggcaccaccacagctgcccacttctggaaggttccatccccagaaggtctggtctccaccagctccatgtcctgagtctgttcttcctcctccctctgccaagtcagggtgatctcagcagggtagaagcccatggcccagcacctcagggtgacatcacctttaggtccaggatgatgggtcacatgtgcctttgggggatctgtgtggaagatttaagaaatcccacaagaacaagataaactgaaatctgcaaagacaaagttaaatcaatgatgacactgaactatgtctgaacacttctgactgtcaccacactagtgacccgcaggaggcgctggtccccctcatcacagatctgcacattttcctggggggacccagaagctaagaggaaagctcatgaaccagcaggtcacatggtcttccttatgtgatgttgtgtagcataagttaggtggtaaaagaatggaagaagggatggaaaacatttaatttatatatgtgattaaatatatgtcataataagaaataacgaacactggctacataaagtgagccaccaacttctgctgccaccattgaggctcaactgctgtctaagtgaacagccatgaccaaagtgtgcagcagaaatggggtgaacctctgacactcagcaagagaaaatgactccccaagccctccctctgggggtgggacaatatacaaggtgttgtcacccaggatccctggaagtgtgctgtggagcccagtctagcatttactgagatgcagcagtgctcacaggggtttgtggattttccctgtcactccaatccttgagttgtagaagaccctgtctctgaggaagttcatttcctaattcactcgaggcaacactgtaacttgttgtggttgagggagtgcagtgggggtttggatggttaattctggcaaaaaaaaaaaaaaaagtcttaaagtctaagcacacaggaatctttcttgtttcaaaggaacactgacttaacttatgtaattatccagagcatgagtcccccatggcacctgtacagactgacactcatgatagtacaaggggaggaagaaacaatatcaccccagagaagaagaaaactctctaaatgcaaaataataccttaaaaaagaaaagaaagaagaaaaattcagtttttttcagggaaccccataaatgctccttttaccactcaaggaagagatagaattggaatgagagagggatgtaaacctcactcacaggaatctgggagaatgtattctttggaaagttctagaaactgggcagaaccagcctagggtagggacatccacgtctcccatcaggtacaggagacttccagtcgtggtgtgtaaggctgacacactcagacaccgggtgtgggagaggccatggctggcagagggctgccgactgaggagccactgctgaggatgtggacatcttctctcccgccctcctgagacagatctggaactgtccagggagaaggctgagccctgggagatcagtgcaggccctgccaggctggatcaggagccccagggccactgtgtcccctcagagacaggggcgtgaccccagctgagggtctcttcttcctcaggactgagcccagcccgagggcagagggaggagatgcccgctgcccctgcacctgtgcgcagcagctggtccttcccgttctccaggtatctgcggagagacttcaagcactcgtcctccaggtaggccctgtatctttcttcataaccatcctgctgtaacatgtgctgggtgatctgcaccgccgggtccgccacggtccacgtcctcaggtcctcgttcaggacaaggtaatcgcggccctcgtaggcgtgcttctcatacccatggaggaggcgcccatctgaccccatgtcacagccacacacacacacactggtaggtgtgggaacctgtgggcaaccggcggtcagctccgcccccacgccccaccccggggtcacccgagccccgtggcccctcccacccgcagatccttaaattcaaagagaaatagggtctgcagcgaccctgattcctcaccgccctcgctctggttgtagtagccaagcgctgtcctcaggtacaatcggaaatcctgctcccagtccttggctctccatgtctccctctcccaatactccggcccctcccgctccatccacggcgcccgcggctccacagtctgagtggactttataaccagtgctcgcggcgacgttggttggttcccctggatctcgacacctaacgggggtgagaaccgccgagttgtcatctgtgtccgggcagaaggagctgacacaggtcaggagctggagaagtgaaactgaggacaggggatcccagcgctgggcgtccccacccaggacctcacctcctgggactaagactttgtctgaccctgtgctgcggacacagcgctgtttgtcctggtgtctctgagccgcctaaggccaactgctggtcaggtgactcaggatgaaacctaagagcttgacgtttctgggtaaaacacacgcagcacttaaaatgaatgttcacttaaacaggtgctgtcgcagtcccggtgagtgcgtggggccgccgtggacactgcatgggaggtgactggagttttacagctctggtcaagtccttctgacacactgtgtcatatgtgactctccgtgcaggaagcagtccctactctcctctgctttcactttttacttcagttatgtgtggctgggatgtgaagatatcaaatgaaaatgcactgaaacaaaaaaattataaatttgattttactccacactactgaacagtagaataaagttcaaatcctgtgtgtgtacctcggcgatgagaatcaacctgtgtccagtgtccacactgcagaggaacccaggagccaacacggttatcagatccagtatctcacaaacctgtgacattcgtctccctcatctcaatagctcataaagtgttagtgaagaaggtctcagagagagagagagagagagagagagaatgagagagtcacaggttatatgccttctaacacactatcatcattattttctttatagttagttacagttcctctcttactgtgtttattcactaaagcaactgtgccatggaagtgtgtgacacagggaaacatggagtgtagacagcattagtgtcctgctgtatttgttctccacttagtctctccccagtggagaaggggtccactgtgctgagacgatgacccaggtccacacagacaatctcaggactatggagtgaagacccttgtaaaacacaaccacctggagccacagatggtcatctggaaaaaacaccaggagtctgagtgtaagcacaaggctgtgtagacaggatcctgagtgaagaggcaaagtctctatttacaggggagattcctgagcatcaggcttggcaatgtgagcgccccctgcaggtggacacaggagcctggtgtctgtgggagtctgtgtggtgcttgccagccagagcttctactttaaagagaagcatctctctcccctgtatcccaacctgagtgttgccattgtattcctggaagtgacttttcttctggaaaagggtctgacttctgaagagaaggcagaggaaggatgaggagaggagaaaatgttttgagctttggatctctcctggtgtttttgttttgtttttgagacaaggtctgtctcctccattctgggggtcctgaaacgtactgtgtagaccaggctggtcttgaactcacagagatccacctgtgttttcattcaaattcctgggattaaagatttgtgtcaccacacctggctttagttccatttctatggctgtgataagacactgtgacacctacaaattataaaaggaagtgtttaatttagtcttacattttcagagggtttgagtccatgatggcagaggaaaggtgtggtgacaggaacagctgacagctcacatcttgttccccaagcaagtgttagagacactgggaatagtgggaatcttttaaaacctcaatgtccagccccaatgacacacctcctccaacaaggccacacctcctgatccttcccacacaattccatcaactggagctgaatccgtctgaacctctgaacctgtgtggccattctcattcaaacagcacagtattcagtgtggcatgtgagatgccctgcaggactctgcagatgtgtccctgagatgtgtagacagcaccctcaacttaggaggaccccactgcattaggatctcacctttttttttctgtcacctcctgcccagcccttctctgtctcctcaggcctcaccccatcagtgcccagcatgtctcacttgagctctgcactaactctgtctcttcttttgcatccagtttctgtggtcagccatcttgtcagccatcttgtcagccatctttctgtgagccaggctgtgtggtttccttctgtaaaagccccaataggggctggagaggtggctcaggagttaagagcacctgttgctgttgcagagcatccaggttcagttcccaccacacacgtggtgcttcacaaccatctatgactccagttccaggtgattcagtgcctggtcgtcctgcatgcttcatccctctctcctagagtgtgccacctaggggctgagggcacagggctatttagtcaacactgaaccagtagccagtgaaaccagagctggaacaggacaagcaatgatgactgaaatagactgtgctgaaatgaacattagcaaaacagcctaaaactaaaaacacagaaagatttcattttgtgggcctactgtgcatagtggaccacggcctcattccaggaagaagacactgtgtatgctcttccgtgcacttgagccctgtgctggttgttgattgctgatgaacaagagacctttcagccagtcacttaagtagtcacttgtaacaggctatgacatccccaacatgccaagagtccctgcagccagtgatgtcccctgtcccctcattttccctcccacgtgagttcctccagggtcttgtctttttaatacaaaagggaagcatcagagtctatggcaatagttcaatcctttagagaaaagaaaaccaggtgtctatgtgagcccacagaggataaagttaaagagaaggaaccatggccagctgagctgctccatgacacaccccccccaacacacacaccactgtgagggtctcagtctgtcttgctctcatcaaacttacagcagatagaaatttccactctttttttacctgtgggaagaaaactccctgcaagagggtagggaaaatgcagagccctgagggccaaggcttggcactaggggactttccagaactctgaaacagactgtgatatctattctggtttgtcaccatgactatatctgaaattgactaaaacccaaaactggagggtacacctgtgagggattgtgtgtgtgtgtgtgtgtgtgtgtgtgtgtgtgtgtgtgtttaatttgaaatgggaagatcaacttctgatctggatctttgaggaagaacgataaatacagttgaactttctttggactgccaacttctgaataatgacaaggagactttttactaattatgaaaattgggccatagcttaggcttgttgcctgctcactcttaaaactaaattatccctttatattaaactgtgttctgtcacttggctcaatacctctcctcactaagtctaacttacacatcctctggctggtgaataccccctgcctttgattccttcccagagtttctctctctgccaggaagtcccccatgttgtcctgcctaggtattgcctatttagctctctgttaagctaatctgaagttcctttggcaagtgaggaaggacagaaacacattttacaaaaagatcctactagacaaacatttaatccccatatttggagaaagaaatatcggtccctaatgtgagccacatgatctactgaaaatctatataaggacatggaagaaggaagcttttgctttttgcttgcttgttcttgccttgctagactgtccattccttcatggcattagaacctacttctttgggaatcgagcatatactgaagaccagctgagccaggaggtgaatgaactgaggagtgaccatgtcacagctgacaatagactgagctccatctgggcacagccctgtgcacactcagctcctacaatcccatcctgtcccacaagatatacacagcatgatgaacacatatctgggaggttctccatgctgctattcatttcctccacagcatctaagtatctcatgaagttatttaacagccaaaaaacctggcagatcaaggatgagaacaatcaagttcaaattgagatccttattttagtggggaagtcaggggtgcagctcaggacagcacggatgtgacaggatggagatgtccctcctgtctgcttaaacagaacaattggctgtggaagggacacaggcagtgcagagacagggtcctggtgtgcagggctgtgctgggctcccagttcttcacattgagctcataggatcacagagaaaatcagacactgaagccaagagtgaactgagtgaccctggatgtcacaggagagacctgaacacactgtctttcactccatccatgctaggcagctgtcttcacactacctgaataagagtcatgaacaatcactgtgaagacaacatcccaacaatccaccactcactcacaagtgattctgggagtccctgaaacctaatcatgaccactttgctctccccaaacacaaatgaggtcccagagtgtcaccttcacagtctgggagagacacatcagaactctgggaactgtctctgaagttcatattcataagaaggtaaaaacaaggcccctagaagattttgctggagaagctaataaaggttagaagagctccacaaatactccaggtccaccacaagggtctaagggacaatcctgctcccttacctttagctggagcatagttccctccttgtccacctgtgagaagaaaagctgccagaggccagggaagagcctgtacctaggaattttccataaccttcagaagacccaggtcagacacaggagcaatgggggttgtggatgtgtttccatgaggcagagcacacttctaaaaggtgctgagagagaacttagaccctgccctttcctacctgtgtttctcctcctcttcctcacaacaaccaccacagctgtaatgatggtcacaactccaaggagaaccagagcagcaatgactgccatgatgggaacagtggactgaggaggaggctctgggaagggaaggacaggaagggaaggaaaatgcagagccctgagggccaaggcttggcactaggggactttccagaactctgaaacagactgtgatatctattctggtttgtcaccatgactatatctgaaattgactaaaacccaaaactggagggtacacctgtgagggattgtgtgtgtgtgtgtgtgtgtgtgtgtgtgtgtgtgcaccaccacagctgcccacttctggaaggttccatccccagaaggtctggtctccaccagctccatgtcctgagtctgttcttcctcctccttctgccaggtcagggtggtctcagcagggtagaagcccagggcccagcacctcagggtgacatcacctttaggtccaggatgatgggtcacatgtgcctttgggggatctgtgtggaagatttaagaaatcccacaataacaagataaactgaaatctgcaaagacaaagttaaatcaatgatgacactgaactatgtgtctgaacacttctgactgtcatcacactagtgacctgcaggtggcgctggtccccctcatcacagatctgcacattttcctggggggacccagaagctaagagggaatttcatgaaccagcaggtgacatggtcttccttatgtgatgctctatagcgtaagttaggtggtaaaagaatggaaaaagggatggaaaataattaatttatatatgtgatttaatatatgccataataagaaataaggggcacaaattacataattggtgccaccaactactgctgatacccttgaggcacaactactgtggccatcttgctgaccaccagcattactgtctgtccaagtgaacagccatcgccaaagtatgcagcagaaatagtgtgaatctctgacactcaaagagaaaatgactccccaaaccctgtctctgtggggacagaatgcaaggtgtggtcagtcacccaggatccctggaaatagctgtggagcctagtgcaacactcactgtgacacagcggtgctcacacgggtgtgtgggttttccctgtcactccactccttgagttgcagaagccccagtgtgtgaggaagttcaactcctaattcactggggcaacattgtaacttgttgggactgagggagagcagggggctctggatggttaattctggtagaaaatagttgaaatcatcagaatttttctcctttaaagggaacaccgacttaagttgtctaattatccagagcattagtccccatgacacctgtggagactgatacccatgatagtacaaagggaggaagagaagcaatagcaccatagggtggaagaaaaactaaataaaagcacaatggcaacttcaaaaaaaaaaaagaaggaaagaaagaaagaaaaaaagaaagaaagaaagaaagaaagaaagaaagaagaaaccccacaatttggaattttcccagagcaccctataagtgctcacgagaccattctaggatgagatagaattggggtgagggaggggtgcaaacctcacccacaggaatctgggagaatgtattctttggaaagttctagaaactggggaaccagccttgggtagggacatccacgtctcccatcaggtacaggagacttccggtcctggtgtgtaaggctgacacactcagacaccgggtgtgggcagagaacccggcctgggagaggccatggctggcagagggctgccgactgaggagccactgctggggtgtgggcatcttctctcctgccctcctgagatagatctggaaccgtccagggagaaggctgagccctgggagatgagtgcagcccctgccaggctggatcaggagccccagggacactgtgtcccctcagagacaggggcgtgaccccagctgagggtctcttcttcctcaggactgagcccagcccgagggcagagggaggagatgcccgcggcccctgcacctgtgcgcagcagctggtccttcccgtgctccaggggtactccaggtatctgcggagagactccacgcacgtgccctccaggtaggccctcattgtttctgcaaaattagcctcgtcccacttgcaccgggtgatctgcaccaccttgtccgccgccgtccacgtcctcaggtcctcgttcagggcgacggtaccctgacggtacccgcagaggaggcgcccatccgaccccacctgacagccatacatcacctggatggtgtgagagcctgccagagcagggagatgcggtcagccccgcccacttgcccctccccacggctccgcccaccgcgcatcctcggaactgacagagaaaccagtgccaggtcccactctcctcctctcggacctcggacttgggaccaggggcgactctggcccttacgtggggacgtgaaggtcgtgacctccggcccgggggtcactcactgccctcgctcttgttgtagtagccaagcagggtcctcaggttccttcggttaatctcctccttgttcttggcgatccgcgtctgcccctcccaatactccggcccctccggctccatccacggcgcccgcggcttcatcctcggattctccgcgtagctgtcgaagcgcacgaactgcgtgtcgtccacgtttctgacgacagtgaaccggggctccccgaggcctggccgggacacgatggtgtggaaataccgcatggagtgcgagcctgggggcggcgcgcggtgagacccagaccctcctcccgggaccccgggcgggtgagcgggccgggaggagagcagggcgcggggcgcgggacgcgggtggggaaggggcgagagtgtccggctgggcgatgcggggacgcggcttccccggtgccgcccccgccctccccgaagagcccgtttccctcgcgacccagctctcacccgcgcgggtctgggtcggggccagggcggccgccagcagcaggagcagcgcgcggtgccaccaaccccatctcggatctgggcgtccgggttccgcggtctgcatggactttataaccagtgcccgaggcggctctggttggttctccaggatctcgacacccaatgtggtgagaactgccaagtcttcaccagtgcccgggcagaaggagctgacacaggtcaggagctggagaagtgaaactggggacaggtgaaccccagcgctgggcttccccaccccagacctcacccgccagggactaagactttgctgaaaacacttaaaattggaataaagtgataagaacgcagctttacaatagcttggggctaatggaaaggccggataattcatcctgtttgaaagctgggacttcatctcagagtcctcggaactccacaggaggtctgtgggaaaattcaactgagaagttgaattttctgcttgctgccatgtagcaaaccagcaaagctcagcctctggagacaccaagcattcattactccccacagtgtgtgaccccaagagtccctgggtgatcctggcttaggacctctcccaggtcacagttcagttttctttctctctctctctctctttcttttcttttctttctttttctttttctttctttctttctttttttttttgttttttcgagacagggtttctctgtgtagctttggagcctgtcctggcactcgctctggagaccaggctggccttgaactcacagcgaggccacagttcagttttcatcctgctgtgtttttttctcaaggcttcaggagagccagggttgcatgagatgtggcttcctcgtaggccagctggaaagggctcagcttcctgcccagagcaccctataagtgctcacgagaccattctaggatgagatagaattggggtgagggaggggtgcaaacctcacccacaggaatctgggagaatgtattctttggaaagttctagaaactggggaaccagccttgggtagggacatccacgtctcccatcaggtacaggagacttccggtcctggtgtgtaaggctgacacaagaatgtgcaacgtgctcaatatccaatcccagatcacaacttactgcttccttcattaggggaggggatgggaggggagtgagcaggttctgaacaccctagagtgccaagttcctgctacaacctgtgttcaggtcgtgtgtgtgtgtgtgtgtgtgtgtgtgtgtgtgtgtgtgtgtgtgttacatgtgagtatatgcttctgtgtgtttatatgtgtgtgttccactcactaggcactcttcttgaaggtgctgaataattacctcagcttctgccccttctgtgtgttctttttcacccacatcataagacctccaatggtaaaacataagatctcagctccaagggcagcaccaacaattgtcatgatgatggtggtggattgaggaggctctggaagaggaaaaaatgaagggtgtagaagggtgactttaccttcaggtctggggtgatgggccacatgtgtctttggagggtctgaggagaagagttggaaagttcaagtgtttgcaggggactccagcagggtccctgtgaccatcctgggattggtcagaaatggggtgagggaggggtgaaaacctcttctagcttagacacagggttctggataatctcaactttaggaaattctagatatgggtgagagagtccagggtcactgaactctggtgtcacatcaggaaaaagggacttctgcttctgactggtgagtggggctgatggattcagcatcactgaattcagaccccagagaccttgggtgtgggcagagagctgggcctgagcaagatgtggcccacacaggactgcagactgaaggttaactgtcttggtcatttcagggaccttctctccttctgtcccaagacacactctgaactgtcctgtcagaagcatgagccctgggagagccagtccctggtaaagggtcaggagaccctattaaactttccatctcccatatttgagagatagagaaacaggtcattattatgtgaaaaggagagacatccacagtttctcctaaagccaggaaggattcaaggatatacactctccacccttgtatttgatacagtggtgattttatatgagctgtcaatagacagaacttttgcataaaagggatcaaagtaggaaaggaagaagttaacactgtccctatttccagacagcatgatttttttatatatataaatgaccctgttgagtccatgggaaaccttgatgggatatatatatcccagttggactgcagacaagggactagagcctcagtttacagagactgcagaaactaaacaccaaggaactaacattgtcgatttacaaatgggtgagggaactgaatagacagttatctttttttccccaatagattaggaagttagggcagtcactagtttcagctaaaatacagcccaaatatatatatttggggcaaacagtttacaagtaatataagtctgtaggggaagctgcagccacgcctacttaggggctggctacaggcgtgcctgaccatgcttgcgagggcgtggtcagggtgatgtagaggacactttcaggggtctgcgtttctctttcggtttcacttttgtacttgctggacagactgctgccacgccggttggctaggttgctctgtaagtaaggcttttcccttaatattaaatacccttatatttctacttggctccgtattggtaatttcccactatagtaggccagctagaaactcatataggcaatgttacccagaaattagatgcaaaggtgcaagatacccaggatagggttgaagaattggacaatgccattcaatcaattattgaagcatccaaggtagcagatcagaaatttgagtctagatttgaatgtttggaagataatttacagtacagggctgacagattacataggtccatacggtcgattgctgaggactcaaaatcagcaaatcatgacatcgaatctagactccaatacctagaaggcagtttccatgccatccagatgctgtctaaggatgatcgtatgaaagacctagaaaaacgtgtagatgagcagttagagcaatttacagattcactaacgtgcttggaatcttttatgattaaggagattgaaacttttcaaaaggatatcattgctaggcttaaagatcagtgggatgcctcagaagcagaatcactccaatcccaggcacctactccacccaggtatcgtgactattcttctaaggttgttactcgtacaccattagtgtacccagctaccatggtagaaaagccagcttctaagaaacaccctcatggacgaatggtttatgaatggcaacctatacaggctcatggtcggatgacttatgaatggcaacctatacagctgaaggatcttaagaatattaaagaatcagttgtctcatatggtctccatagcccatacgtaaaacagctattacattcatgggcaacctttaacagggtgacacccacagattgggaacgattggtagcagctgtacttgagaattcatgccaaatccagtggaaggcattggtaagggaagaggcaaagctccttgaacgtcagggcataacggaaggttttgaagaccccctagataagattcttggtcagggtatttatgctgacccacaggttcaggctgaatatgatgacgatatactgtctctatgcaggaaagtagcattaaatgcctaggataaggctcgtgagcaaggagaacgcctagaagcttataccagaatagaacagggacctacagaacagttccaggacttcttacaaaggttaactagggcagtagaattacaggtaacagatccagaaacaagacaatcaattatatatacaatagcttatgaaaatgcaaaccctatatgcaaaagaatacttttgcctttaaagatcagatcagctccgttagaagaatgggttttgtatgcagccaagtgtgattataatgtgcaagatactggagcttgggtaggagaagccattttgaaaggtttaaaaaggcaacaggaaattaaaagttctagatgtgagaatgcaagagcttgggaaggtgaagcaccttacagaggtcaacataggtacaaagaggctagaggttactactactatgaaccagaaccttgggtaggaagagccttcccctggagaccacgaaggctccaggaacctagatgtttcaactgtggtaaaatgggacatactaagagaaattgtagacaaatgaattctaacaatgcctcatatggaaggccactgccttctggattgtgtagaagatgtggtaagggcagacactggaccaatgaatgtagatcgaccagggacatacaaggaaaccccttaaggtcgggaaacccctgctgtgaaaccccgaggggggactcaagaaggcccccacattaagaaaggtcgggccattccaagtagcagtgggagacaatctctcacaggaccaatagatagttctttgcctattgtgaaaaatgatactgctctagatggtactttgaatagtgatgaagaatcaagtgtgaatggacaaaatgagtaacacatattttggcaagcttctattaatgatcaaaggcctcagttgaaagtgaaaattaataacaaagttatttctggcttagtagacactggggaggatgtaactattattannnnnnnnnnnnnnnnnnnnnnnnnnnnnnnnnnnnnnnnnnnnnnnnnnnnnnnnnnnnnnnnnnnnnnnnnnnnnnnnnnnnnnnnnnnnnnnnnnnnnnnnnnnnnntgttaactcagtggtctgcattggaccggaaggacagaaagggatactgaaaccatatgtggcagatatagctataaatctctggggtcatgatctcttacagcaatggaatactcagattaatattcctccagtgtcagatacaaattatgtacaatctttagatagtagaaacgatctgataagatgctatggaaaatgtttaccaaccatccatactgtacagaaactaggtacaaatgatggaactttagaggagccaaaggcnnnnnnnnnnnnnnnnnnnnnnnnnnnnnnnnnnnnnnnnnnnnnnnnnnnnnnnnnnnnnnnnnnnnnnnnnnnnnnnnnnnnnnnnnnnnnnnnnnnnnnnnnnnnnnnnnnnnnnnnnnnnnnnnnnnnnnnnnnnnnnnnnnnnnnnnnnnnnnnnnnnnnnnnnnnnnnnnnnnnnnnnnnnnnnnnnnnnnnnnnnnnnnnnnnnnnnnnnnnnnnnnnnnnnnnnnnnnnnnnnnnnnnnnnnnnnnnnnnnnnnnnnnnnnnnnnnnnnnnnnnnnnnnnnnnnnnnnnnnnnnnnnnnnnnnnnnnnnnnnnnnnnnnnnnnnnnnnnnnnnnnnnnnnnnnnnnnnnnnnnnnnnnnnnnnnnnnnnnnnnnnnnnnnnnnnnnnnnnnnnnnnnnnnnnnnnnnnnnnnnnnnnnnnnnnnnnnnnnnnnnnnnnnnnnnnnnnnnnnnnnnnnnnnnnnnnnnnnnnnnnnnnnnnnnnnnnnnnnnnnnnnnnnnnnnnnnnnnnnnnnnnnnnnnnnnnnnnntttatcattacatggatgacattcttatatcagattccaataaagaaactttggaaagtatgtttgaaatggtgaagaaagttctgcctcgttggggataacagattgcctgagaaaatatacaaagaggaaattctattaactattcaggttacaagatagacttacaaagaatcagacttcaaaaggtacaaattaggagagattgttatcaaactcttaattctattcagaaattattaggggaaatttctcaattacagatgattattgatgtagaaggacatgacctaaaacatttaaaaatggcccttaaaggtgataaggacctaaacagtcctagaatattatctgcttaggcagaaaaagggttacaatgggtggaaaacagaatattggatgcacatgtagatcggataaacattgatttagactgtattctggttatcttgccatccagagaatacccttctgggattctgatgcagagggaagacactatatttgagtggatatttctgctacataaacataataaaaagttaaagacatatatagaaatgatttctgatttgattctaaagggcaaattaagactttgtcaactgattgtaaaagatccagcagaaattatagtacctttaactaatgaagaaatttcatccttgtggaagaataatgaatattggcaaatagctcttactgacttttaatcaattatatatacaatatcttatgagaatgcaaacccaatatgcaaaagaatacttttgcctttaaagatcagatcagctcctctggattcttccacgtattgtaagacaaactcccatttctggagttcttaccttctacactgatgccaacaaatcaggtaaggcaggttataaagcaggtgaggtaagtaaagtagttcaaagtccatatacatctgtacagaaggcagaattatatacagttctaatggtacttatggatttcacagaatctcttaatattgttactgattcccaatatgcagaaagagttgtgttacacattgagactgcagaattcattcctgataatatgcaattaacttctctgtttttacaattacaggaaactatcagaaacagaagtaatcctatatatatgaagtaatcctatgtatattacacatatcagatcccatacgggtctgcctggcccactagcacaaggcaatgatgagattgatcgtttattaattggaagtgtgctagaagcctcagaatttcataagaaacatcatgtaaatagcaaaggtttgaaaaaggacttctctatcacttggcaacaagccaaggagatagtgaaaaactgtcctacttgttccttttataatcaaactccattgccagcaggttttaatcctaagggcatttggagaaatgaggtttggcagatggatgtctttcactttgcagagtttggaaatttgaaatatgtgtatcatactatagacacattctcagggttccaatggactactgctcttaattctgaaaaagctgatacttttattacacacctgctagaggtgatggcagttatgggtacacctgcacagataaaaactgacaatgctccagcatatgtctctacaaaattagaacaatttttcaaatattataacataaagcatgttaccagtataccacacaatcctacaggacaagcagtagttgagagttgagagatctatctaatcgaacacttaaggagatgctcaacaaacaagcttggaagactaaatcccctaaacattggttgcataatgctttattaacactaaactttcttaatgccaatgagaaaggacaaacagctgcagaaagacactggactatggagaaaaccgctgaactgaatcagctggtatacttcaaagatgtactaacctcagtatggaaaccagggaatgtgttacattggggtaggggttttgcattggtttctacaggagaagaaaaactttggataccatcaaagttggtcaagattcgagttgaaaaggaaaaacctctcaacaaggagaaatgacaggtattctnnnnnnnnnnnnnnnnnnnnnnnnnnnnnnnnnnnnnnnnnnnnnnnnnnnnnnnnnnnnnnnnnnnnnnnnnnnnnnnnnnnnnnnnnnnnnnnnnnnnnnnnnnnnnnnncatgggtagatacttaagaagaaaaggtagctataaccaaacaaaaggaacgtgcctatatacggtaaactttacagctgtctctccgagaactctatttctcttcatttgctagttcctattcaattaaaccaatgctggatttagaggtggatttggctttcctcctctaaaatccaagcatgttatttaactaaactttagtgtttctgtattgtatcaagaagccaattgatgtaatacagaataaaagaagaatttggggactgtctttgtcttttcttggatctttctctcaaggtgtacaccctctcataattgttatgctctcatggttgcagtccccagcatgtgtacatacacaagcaaacatttctctgctaagtgtttatgtttgagtcccacacagccaatgaagacctgcctgacagcaatccctggacaccctggaaagaaaatgggccatacctccttgcctgcactggatccaacttgctccatttcaacggacactctggtcaaagcttcggatactgacttcaatcaagttgaggatttcaagcgagaccttcaatcaagtgaatcccatctaacatggactggatacaatccattcaagactttcactaactagtactaaaatactaacattttcttcctgcttaccttcaggtacatcttactgtccttacccacccccccagtatctctcccagttattttccttctcttgcccttagacccacctcaggagggtgggaccaacccttagtaaatctctctattctgaaccttcacccaagcaatgagtttcttggaaaagaagcatgcaaccttatttcaaatgacctatcttaagggaacccaaatgtcatcctccagccctaatgtatttcccagtcactcagtcatctatgtttatgcctggtataacttagagattaaagtattattacatgacttcttcctttcccttctcttctttctctgataagaattcctcaggctatcaccaacacctctccccacctcagagcggtgcctccccacccaaaccatggatgagctgaaaaatctctccaaggccaagacgtagagtgagattttcaggggactgcttttctcttttggtttcacttttgtacttgctggacagactgctgccatgccggctggctaggttgctctgtaagtaaggtttttctctattaaatacccttgtatttctacctgactccgtattgttaatttcctactatataagtctctgtgtgtttatttaggaaaaagtgtctgtgggaccaggtggacagaaactccatctaccaaagctcttggacctaataaacactcatggttgtcagatacaaaaatcaatataaaagtaaccttcatgccaggtgttggtggtgcacgcctttaatcccagcactgggaggcagaggcaggcagatctctgtgagttcgaggccagcctggtctccagagagagtgccaggataggctccaaagctacacagagaaaccctgtcttgaaaaaccaaaaaaagtagcctttattcatgccagcagtgtattttagaaaatgtacaacattcaaagcaactgcaccagaatcaagtgtttagagatatatctaaccaaggaaatggaagaactctacaatgaaaacttttaagatctgacacaggaaatcatagagacaatgtcagaagatggaaagacaacccatgctcctggatgacagagttaatactgggaaagtggtcatactacccaaattaatctattgatttattgtaatacttttaaaatgctgatatattccaaagctttagaatgaatgaatttgtatggaatgacaagagaccatgtacagccagacaatcttaaggtgttctactcccaaccttagtgcagagctagagtgagagagacagcctggacctgcaataaaatagaaaaatcaaagacatagcatagagttcctggatataaaatgacaaagctgtgaatatttaactttcaatgatgaatgcaaaagccatgatgctgcaacacttttttttttaactgagaagatgaatttaggttctcacctttcaccttgtacaaaagtaaacttgaaatagaacaatgaccttgttaagtccaagagttgaaactcccagagctcaagaatacaatctaggggaaactcttccagatactggagtggataagaacctcagaataggacaatagcacaggagctaattagatcatgcgtcagcatgaagataagtctcttcacagcacaggacacaatcagcagagggaacagaagtcacaataagagaaacctgtaccatctggtctgcagtcaagggactagagcccccagtttacagagaactgcagaaactaaataccaaggaactaacattgtcgatttacaaatgggtgagggaaccgaatagacagttatcttttttgcccccaatagtttaggaagttagggcagcactagtttcaactaaaatacacctgaaaactgacaagtgatcacatacaataatgtaaagtacattttatttgaaaaataaaactcattggaacaattctgaaaggttcattagaagactggcagggtatccatttaagacatagacagtttgtttcagcccccttcaagtcagttgtctagaatctaaaactcattttctttacctaagctgagagcttcctagcatgtaactgtgttatgaagaaagaggactgaggtgaaatgtgtttaccatcagagctgctccatcgtttgcctaggatctcaaatgcttcatggaatcctgggaaatgttcatgcataaggatattgcctgagctgacttaaattgctccatgaattggtgcattattaacccttagtgaagccttaaaaaaaaaaacaaaaaaagaaatcaggttgaaaactgggttaaaggccagggcggtggtgacacacgcctttaatcccaacacttgggaggcagaggcaggcggatctctgtgagttcaaggctagcctggtctccagagcgagtgccaggataggctccaaagctacacagagaaaccctgtctccaaaaaaatgggttaaaggaaacaaatacagcatctgcttttagaggtatcaactcaggaattttctcaattatgaaatctggcagaaggtatgtctcaaaatccagaggataacaacattcctaactccagatctggcttttttcttttcatcatgactgtcttatgactcaccattagctttctctacttctggtaaatctgcatcttcatcaccacccatgtgatccatcatctcagaaaaacggtcaaaattggacatgtcttcaacgaatcatcctcccagtctttccaattgttgaagtccacactaagccacttaagctttgcccttcctttgttaaccaaggccacaaggggccagagtctctttctgcaaacaacataaaattgatctgtctatcttcccctcctcccctctacagggtttctctttagctttggagcctatcttgggacttgctctgttgaccaggctggcctggaactcacagagatcctcctgcctctacttctgtagtgctgggtttaaaggcatgccccacccccactcccacaatctgtccattcgtttatgcttggaatcatttgaatcaatacagtgaaaaagatccatgtcgtttaaaagcttaaattatcgcttctccaagcaagtttggatttttcaaaatccacactaacatctttattgtctccaacacaaaattcaatgaatacataattccttggatcctaccactttgcatacacagctagcgaaccgggaagggaggcaggtaaatgggtggcggacatccctgacaagcctcattggcagctgtggctggctggtcgactccttttgggagggtcgcccacgttttctgcccattagcagcctcttcttgctcctctaaggcaacagcagtggagggctggcacccagaatgcacccagtggagagcagctccctcagtctatgagaagaggaaagtaggacaaggggctcaaagatggagaatgagagtgcctgcgtgcaaagggtggtgaacctcagttatcttaataaaagataaaagcacaaaagtccattaatatctttagtgtgttgagtatctccagccttcatgaaaatacagactaaactacttagaagggctggagagttggctcagaggtgaggagcacttgatgctcttgcagaggacctgggttagactcactgtatgtgactcagtcccagggaatcacacacgctcctctgaccccacactcaaggtacacacggtgcacatgcacacgtgcaggcaaaacactcatccccataaaagaatgaaataaaaatgaaagttaaaactgctttgtgatagcacctcacccagtcagaatggctgtcaccaagaaatctgacagtaaatgctggagaggacatggagaggagccaatactctctcctgtgagtgtgtgtgtgtgtatgtgtgtgtgtgtgtgtgtgtgtgtgtgtgtgtgtgtgtaagtcaattttgacatttctcaaaaaaataatacaattagacccactgactgtcacacaggaaaaaaaaaaaaaaacatttcaaaaaccaaaacccaaaggaaacaacaacaaagaaaatagaactagcatatgactcaggtaattttacttctgggcagaagtccacaatctactggtgggaattttgcaccccgtggttattgctgctttattccctagagccaagaattggatgtaatccagttgtccatcaacagatgactagacaatgaaaaatttggtatacacataaaatggaataccattcaaggctctcaacaatgtaatccgaaaatactcaggaaaacagatgggtgtatactattaaccgaggagacaatctcagaaaaaaaaaaaaaaaacaactacattgtttttcttggtatgtgggatatagacaacaatatatggatatatctaaacaagtgtacatttgtgtacagtgtagcaagaaagcctaatactggaagatgagaaaggactgaatgaaggttatttgacttgagtcatgaaacaggttataaagctaattgttttctagttttaaatctgtcgtgaattttcattctttttatttttttccttattgatgctggataaattcgtgaattatatttgataacgaatttgtaaaatccaaaccgaatctccacaagttcatggtgtctactctaactgcatagaattaaactgagatgtttagcttttgttctggctaatttcagtgttggatttttctgcaataaagtttcaaaaacttaaaaatatgaagaagagacaggggcatgaccccagctgaggggtctcttcttcctcaggactgagcccagccccaggacagagggaggagtttccgcgggcccctgcacctgtgtgcagcagctggtctttcctgttctccaggcatgcgccctccaggtaggccctctgtccatctgcaacaccagcctgctcccacttgtgccgggtgatctgcgccaccatgtccgcccctgtcctcgaactcaggtcatcgttcaggtagatgtaatcgtcgccttcttaggcgaattgaaggcacctgcgaaggaaacgaccatctgatcccacgtgacagccagacagacgctggaagttgtgagtgcgtgcgggaccccatggtcagttccgccaatctgcaatttctctaaactgaaagggaaatctggtcccggtctactgctttccagcatctctgggattgcgcagcctcagggtcaatctcggatttgggacccgggcgactctggttgtagtatccaagcgcgatcctcaggttccctcatttaatctgcgcgttgtccttggcgatccgtgtctccctctcccaataatccggcccctcccgctccacccacagcgcccgcggctccatcctggcattctctacgtcgctgtcgaagcgcaggaactgagtgtcgtccacgtagcggacagagatgaacccgggctccccgaggccggggcgggacaccatggaggacaggtgtgcctgaccatgcttgcaagggcatggtcagggagacgtagagtgagacacgccggttggctaggttgctctgtaagtaaggcttttcccttctgagcgtccgggttcctcggtctgcggactttatacccggtgcccgcggacgctgattggttccccgggatctcgacacccaatggggtgagaaccgccgagtcggggcagaaggaactgacacaggttgggagctgaagtgaaactggggacaggggagccccagcactgggcttctccaccccatacctcaccgcctggggactaaaagtttgtctggaacactaaccatgtgctgtgggacagacagctgttttgtttggcttgagtcgctgagaccggaattgaggagaggcctatgaaatgaaggtctatttcttcatctcctcccaccttcttcctcctcctgttcttcctatactaagactggagtcttctgggagaaagatctggcaaatgcagtagaggggtagatttttccctccctttatatttttattttatttttttaaaaaaactatatttaccgtgcgtgtatgtctctgtgtgttgccatgttctgctcacaacacacacgtgtggaggtcagaagacaacttgcagaacctggtcctctccttctactggcaaatgcttttcctaaagagccattctgcaggctccatatgatttctctttaaagctcgaagagttcgcccacaaataccgtagagacctggttcctgtgttcatctgcatgagcgggccacatgccaagcctgactggttactgtgtcagctgtgcaattgagtttgggctcttcacaatgtttctaaacaagctttgcttacaaaacttagcaaacgcctagtgtttctttgcaaaggaagcaaaagtgtctccaggtggttggggtttacagtgattgtaaatctcaccctacagaccagagatggtctgtgtggattcaggacgttgtctcaggacagcagaccccttgtccacgggaaagagacaccctgtgagtgcctgaatccagcaccacactgaaccttgtttgcactctgtgtttccctagtgcacacacttttaagataaatcttaatgaattaatcactctgataaatgaactatgtaaaacatagcacaccacacttaaatttctgtgaatcccgatatctttcagaatgtctgacctgtgccttcctcacacttgtggtgatgtgagctgacagatgggctgctgaggggaggggcagtacctctcataactgagttggttcctgagttcctcaagcctgagcactgtggacactggtcatgaggttggatcttgtcctaagtggggcaggctggtggccaggtggtaaatttcaatggtgcagatcttttatttctgggatttattgacttgaccttttaatttttaggaactgaaaacagaggctagtgggaactagtgtgcagagtcacatggcagcacagtttgtcactgtgtgctccgaccacagctggagaagttagtcatctaaaggttcaaatgtccacagcggccctgctggttctaggcattgcctgttctacaaactacacacacgagaagctatgcagacttactggaaaaactcaagcctactttttatcctgatcaacacaaagagatgttcctaggcagttctgtgttaactaagaatgtatagggagcatagctaggctcttcagatgtgtccattaaaattccatgaagtagggactgcagagatggttcagcaattaagagcacttgctgctgtgctgaggactagggtttggttctactgcctgtgtggtgactcacaattgtctgaaacccagaacccaacttcctcttttggtcactctggacaccagccaattcctcttctggaccattctgggtataccagataggtctgtgtggttaaaaaaaaaatctacacacatacatgaaggcatacacttaaattttttttatttagaaacaatcttattttacatatcaatcccaatggcaaacacttttatatgcattaaagaaataaagaggtcattacaattttcatagcttggcctggtggcacatgcctttactcccagcactcaggaagcagaggcagatggatctctgatttggaggccagcctggtctacatagagagctcaatgacagcccaagtgacacaaacagattctatgaaccacccccacaaaattcataacaaatatataaactatactggaatctgatgtttctattattgtgaattctttatgtttggttccttttgtgtctccccggccccctggcttcccagtcctcctctctgtcttatcattagagaaaaagagtgtgaccatccactctctctgaactgtagtagtgatccatggctgcatgtgctccactcaaagatcagcagctgaagacatgaaccatgcatcacctcccactgtgtggcagccaaccatctagcatagctgttctgtctgcttgcactgagattagaggagtggcctctacaggtcgtctttgggagatttacacaatgtgtattttgggcatattcatcccccactcacccctccaacttctcccagatctgcctcaacttccctactctcccccactgcatgtctttttattatttcttttcttttttagaagagaccatctcacagcagggcttctggtcccctggttcttacactcattttgacccctcttcctatttgttcctgagccctaagcgcaggggtggtcttgtaaacatgttgtctggggctaggcaccccatgaccaataactgcattttgactagttgtggctttttgtaaagatcttggttaatgtaaaagaagtttctttgatgagggatgagagctacacttatctgttgctgtagtttttctttcccacctggtcccatctagctcacagccactttgtcccaaataagcacacagacatattagttattaaactgttggccagggctccttactggctagctctatcttaattattaacccatgtctattaatctatgcattgccacaaggctgtggcttacccataatccagcatgctcttttgggcagcatgtcctctcctcctagcctctttctccctctccccaagtatcctcctcatctcctagccccgcctatcttcctgcctctattggccagtgttttattcatcaaccaataagagaaacatacatacataagagcatcccccatcacttatttgtgaaaataaggatacaaattctgttcttagcccctacttaccctgccctagtcgtccgcatctgttgcatcagggaagattctgtgctaggcctgagagaggatgggatcacagcagcactggcaacaatttaaggagaacagaaacttttcaaaccatcctggagtgctgggtagtaaaggtaaaagggccagaaaatcttgcacctctattgaggtcaaggctagcgctgggtgcacagctggctcccctgagcaagtttgtcttatgatctcaaatccagtctccagaaacagaagggaatggtgggggagaggaaaaaagtgtgtgttttcaaaatatggagaagacagggatggtaatagcactgggtacccacctcctctagcctgctttccaggttgccatctccttcagtaccttgagcacttgtcagaaagtgagctgctgtgcagggcataggtcttttattttcattagaccaaggagaagaatggagctgttctggctttgtgcaccttcttcttcttcttcttcttcttcttcttcttcttcttcttcttcttcttcttcttcttctccttcttcttttggttttttgagacagggtttccctgtgtagcttgggaggctgccttggaactagctcttgtagaccaggctggcctcgaactcacagagatccacctgcctctgcctcccgagtgctgggattaaataaaggcatccaccaccaacacccagctttttgcaccttcttgaaaaggggtggaagtgggatgagagaagaggcatttgcttatcaaacgtttatggaagtaataatattcatgggcaggtccatgccctgaaaacacagacattctgccagtcaccacaaggagaaagaacctgctgcatagatgcccctgaaaaacaaaacccccaaacaatcttttcaagttcactgtttagaaaattcagagactgcatgcagaatccaggagccagagtttgatgcaaacctgtccccatgctacctgcatgcccactccttcacacagcttgcagtctccccctgtccttaaagcaaagagtgggtcccaactgtgttatcccagcttggtacccatacttggactccttcattcttcctgaaccttgactgcaggtagtcagggttgtctggcatcagctttcctgccctaccagtgtgcttccccagaagaacccagaaatgtctacacaattcaccccttgcagtttcaagtctctgctgggtatccagactaggttcaaaacttcaaccagtaacttttggctttcagagcagaagcactaacctgccctgacaatgacattgcagaaagttttcaaaccacaaggttgattatacgatttcctttaagggtgtagttttcactctttacatttctgattagatatttttagaacaggattaatctgtggcatttgtagctagttctaaaaattgttcataatttcacttgcaagacatagaacctggaagacctactttggttataactgtctcagcctgctaaacactcccactatcccattaaggaagcactcaagccccaaggatggcttccaaacagagagtggatcaccaatttaatctctcagaatcctatagagccaattcttttttgtcttgtttttgttttttgactttatgatttttttgagacagggtttctctgtgtaacagtcctagctgtcctggaattcaatctgtagaccagactggccttgaactcacagagatccatctgcctctgcctctgcctctctgagtgccaggattaaaggcatgcaccaacactgcccggtgagcccattcttaatatgatctagggtcatgtgggtttctatgactgaaggtcagggtcattcctgaccttctgatccgaatgccctggagaatggtggcatgcctgcccaactcagcaccaggaatttcaagtgttgtaactcagctgagagcaaaacagaaaaaacttgaagtactctagtggcatctttccttgtcagtgaacttgtagtagtggtcacacactttagacgtggtttcaggtgcagacttgactctttttttccctttttaaaatttaaattagaaacaatcttattttatatatcaatctcagttacctctccctcccattctcccatgcccccaactgacccctatcccatccctcttatgctccatagaaagggtaacaccttctattggggatcaccaaaaaaatctgtcacatcatttggggcagggcctaggccctcccccatgtgtctagactgagagagtatccctctattgggaatgagctgtcagtgtccatttgtacactaggtgtaaatgctgttttattaccaggggccccaaagactgtccaggcctcctgactcccatgtgcaggggcctggttctgtcctacactggtttcccagatgtcagtcttgggtccatgagctcccccttgtttagatgagatttctgtgggtttccctagcatggtgttgacccctttgctcatcattcctccctgtctacaaatgcattccaggaaatctactcagtgcttagctgtggatctctgcttctgtttccatcagctactggatgaaggctccatgaaggcatatatggtagccatcaatcttattatagggagaaggcatttaaggtagcctctcccctattgcttagatttttagttggtgtcatcccagtatatctctggacatttccctagtgccagatttctctttttaacctataatggctccctctattaaggtatctcttttcttgctctcctctattcttccccggctcaatcttcctggtccctcatgtcttcctcccagatttgactctttcaaggtgtgcactctcctgggtctcagagggcatgggaagggcagagactgcatcttctggagcaggaaagcttcagcagttatttattcttatctgtgtaagttcttccccaataaaacacctatttatcatttatcttgggtctggtgaactcatttaaaccctgactccaaagtaccccttgagtagtcacatggttcctgttttttagaactacaaaccccaatgtttgagaatgccaggttctttctccccgaaggagaggaaaagttatgttgcagccaggctgtggtcacctgatgtcccttgggtgtagttttctgagatactgtcatttgtggttggtataccacaaaccatcgaagcttcctgtaggtgcttccggatgtggtggtgttggattaagtcatagttacagtctgcacactgcagttagtgcagcacaaggtgatctgcgttcaccatgggccacaatctcttcttcttggtaagcagatctgggctctgtgtcaggtgggaaagccaagaaagcccccatgtgactgagttcattatttaggggttcacagtaggatggaaggcatgagttggggtctgggagtggagaactttttcctatgatgaacccttgctagtgaacggtcagcatttctgtaaatgccatttagtggcgggatgatttgaaatgcctcattttaaggccaactgttcagggtaccatatccttccttgtgtattttgagaactgtgtctttaattttcaatgtaaaatgctatattaaagtcttaagatgcatagatagacctcactgtgtagtcatgttggcctctgcagtgttcctctagtgaaacctgcttcttccttccccacactcagcttgtggcttttcatggagcttccctctctgaagtaagaaatgctttcctaaatctgatgtttctttccgccatcaggacatttctccctctgggttcagacttctttggttctcctccaaccccaggtgctggggatctgccaccattgtggtcaccacaggagtgttagtagctgcatctctctggctgggctgggtgagtagctttttaagcttttcttaacatctttggtgagaagaaggaaaagaacaggagcatgctggggacaaattgagtaatgatggtgaagactatgtggggtgggaaatctgacctatcttgatgaatacccaagcagtttgtcatatcataaagagttataaatgagtcctgaagcaggtattgtttatgctttgcaacactggaatttcttcttcacttacagacaagaatgagggacctgagattatcccatggtcaggaactactggggctccaagaggatgatccatgccaagggcacggcagccctcctgatgaacacagagattaagtcatccccacaggttccctagcatctctggacaacagtgtcagaggctactaactgctgggatcaaacaggggtgcagtgattgaaagcaagaccatgggtagaccagatggccttcacacacttaaggctcagatgtaggaaacaggttgtttgttttatttattttttgtggagtgtgggagggctcaaaacagggcttctctgtgtagcactggctgtgctggaactccctgtgtagaccaggatgttcttgaactcacagaatgacctgtctgtacctcttgagtgctgggattaaaaatatgtgtcaccatggctggctaggaaacactcattttatcatagtcattgtccaatactacatgttcagagaatactgaataaattccgatttcatgtgaagcagctggcatttctgttctttgggagttggactctaagagagaatagaaaggatgtaaaaggaagggctggaggggaggtaacagccagcagggtggagagaagcatggggggggggagagcagagcagggtagaagcagagcagggtggttgcaggggaatggaacgtcaggggaggccatggcatctctatattgtgatggagcagtgcccaacaaggcataccccaagtcaaaaaaactcagtgcataaaggctctggtcactaaccctgaagatgtgagtcctgaaatgcttccccaaagctgccctctgagcttacatgagccatggcacccctccatgcaaataaattagtaaatataaaattaaaaaaattatttgaactttgatgttctgtgcggtctccctgattttctccaaagggcagatggttactttattcagctctattccacttttacagagtcactagaatttttacatggtgtggtgaatgcctttttatttgcccaatgtgtaccaggctctggattctatatcctcagggtgggggggggtcaagacaatttgtagtcagctgtgtatctcaatatttagagctggggagggttaatggtatgagagcaagcacacatttagccatttgtctttcatagcacttttgggtggtgggtaccaattgtgtggctctccctcagtatgacggaggccctgcttgtgccaacagcttcactttaagacaggaagacaatgaactgatttttgccccagttctccattcaagtggaatcaacaacaattaaataaatagtactactcaaaagaaagaaagaaagaaagaaagaaagaaagaaagaaagaaagaaaatcaagtgaactttgctcaactgcctcgtactcactgacctccatttcttcaccaggagaaatcacttcattcaggaaatgtagatcaatatagggaaaagtctgccttgggaacccttagtcagagcttcagagactgagacagattaataaaaataatatcgatgggcgatggtgcatgccttcaatccccagcacttgggaggcagaggcaggtagatctcagtgcctggtccacaaagctacacacacacacacacacacacacacacacacacacacacacacacagcccatcttgggtttgatccttgaatacaaccccccacccccacccaaatcaacaaacaaaacaaaacaaaaaacttgtcactctatctgcctggcatatttgtccccttcttctgtcactgtggcgcccaccccaagtgctttatttctatcacatctccttttccaatattcaataagtctgttgtgtttggtgtggctcagctggtagagtgcaggatggccaggagttcagggtcatcctaggctataaaacaaattaagtgggagccagaagcagaagcagcaaacctttgtgtttttccttttcctaccctgacaattccagtttctactttctcttcctgctttgctatccaggataaaaagttaggttcaggtggcagcttccctcctctatctttcccggtgcccctctccctccctcctgctatatccaccaagttcctggaacaggatgctccaagcttccagggcattgctggagcagcagagaccttgtctgaagcactaccaccagtgttgacaacagaaccagctgctttgtaaggagatggacttggtgaaaacacttgcggagtgctgagttttaaggaaaaaacaaaaacctaaaaaactaaagcatttcttggttctctgtgctggcagtcagggaggggtctgtgctccttcccgggatatgatgtttatcttgttgacacaaactctctctctctctctctctctctctctctctctctctctgttcccaaatatgagagagattggcatgattcatatagcggggtgggggttagttacccttccattctaccttctgacctgtttccagataggtgggaaagtgattcaaaccagctcaggggagtcagagtcagaacagggcaaccactgtccactgtggcatcacagaggaggctgcttgcagccacaaaacttgcaagtaacttagccacaacaccacaacacaggcaagttagtttcaggcaccagagtaagcactgtcccaccacagagggtgcagggtcgctgcagtcacaaaacttgcaagtaactgtgccacaacacaaaacacagtccaggcagttccaggcaccatagcgaccactgtcctgccacagagggggcggggccgctggaggcacaaattttgcaaataactgacccacaacacaaaacaaaagccccatcaagatactgactctagagtttaaagcttacctagtattggtaaagtctaaatggtcttgatccagttcattgtctctgccagttaaatacttaaaagtcaggaaaactctccgccactggtagcagcaaagaaatctcaaacaccgcaggcagaatcagccgttgaagaagcacgcacatgtggacctgaggtgaagcctataatagccaagacacaagggtagacagtgaaattctgtggtgtatcagggaggtctgggagtcttgtctccacaaactggannnnnnnnnnnnnnnnnnnngctcttccaatcctctggcagtactagcatcccagggttagctcctcccaggacccccgaccctccttcccggaccccgggcgggtgcgaagccgggaggggagcagggcgcgaggctcaggagggtggggaaggggcgagagggtctgactgggcgatgccgggacgcggcttccccggtgccgcccccgcccctgccctcctctcagaggccttttccctcccgacccggcactcacgtgcaggccttggtctgagctagggtgactgccagcagcagcagaaccatgggcggcgccattgcccccatctcaggtctgggagcttcagagtccactgccagcttggactttgtaactggtgcccgtggagacgctggttggttctctgggatcttggcgcccaatgggggtgaggacctcagagtggtcatcattattaaggcagaaaggacccaacacacctcgggtgctggagaattaaactgggagtgggagggggcggggtatggggataccctagccctgggcttccccactgaaaatcttacctgctaagactttgcctgacactgtgctgcaggagggagcaatgtttgtcatggaatgtctgagctgcctaaggccaactgctagtcaggttagtcaggatgtgggcagaggagatcaggttcactcagaagtgtgcatagaagatctgaaccactcaggaatgtgaagaggagatcaggaccactcaggagtgcgcagagcaactcaataacaactcagcagtggctccaacccactcagtggcctgatcagtgggagctgagagtataattctaattataaacattcatctgggcattgggatatttcagagtcagagtcagaactcttaatggtctaaccatgtttcctgattaagggctcagtggtcttcctcagcagatgtcctccagtggtgatgggatcctgtcctgtgtggagactacagggtgctctccaggttcagacctaaagactcatggcctccttcctgggttgctgtgtctcccaacagttcccgtggaaaccagagtttagataaaactagaagcggcacaaaatacccagggcacacaccagtgttaagagggcgacagcagggaggccatcaacaccagcaggtttgtggcatcttgaggccaaggcatggtctgtgtagctgcatcacacccgatgctcattctctgtccacagggtctccatgggctccagcatcttctccatcacacagcagggaatgaatgacaaaggatggctgctcctccaaccccagactcagtcaccttctgtagtcattgctggcagatgtttgtttcagggtccactgatctcaggcagccttcaaactcactatgtccctgagactggctttgaactcatgacatctggcctccacctctgcagttctggggtcagaggcatgcacctctatgctcagctatgcagacaccacaaaccatgtgtatcagggcactttggtcatttcatcctgtttctccctttcctgcctctcctgctgtccctcccccaagtggtccccttgctcttcctgtctcacatgtttaaatcctggtccacatatgaataaacatgtgtaaagccacacattgtttcaatatggttgtccccttctctcctgggaaagagactcccagtgagagcctgtgactgaatccagtagagcagtgagccctgtctacactgcttgtgttatgtacacacactcctatgacagagttaataaatccactacagtaagagacgagtaccaattataaagcagaatgatgacagcagggcagtgtagagaagtgattaatttgtccccactgtcctgccctcacccttgtgatgtgtggtgacagatgagctgatgagatgagggagatgagtgacccaggctgtgtgtcagtgactctgtggatctgatacctgagtggaacccggagaacctcagccttgtgcagtgtggacagtgaggacactggacagaggacagttctcacaccagcggagacagactggggacagaagcttcatccatagtcagaaagaaaccatataaaacatgtatgtcatttattcctgcaaagttttgccttgtttctttcagatctcagttaaccaaagtcactaaactgtagacatataaaccctctgataagagacagctaacacaccaagagtctcagggcagcatggcatgtttctgcaagctttaagatgaggaggaggaactttagtcccctcaccctgcagggatccccagctgtctactgccctcaccaggactcaggcactacctgttcccatgaactgttcacacaaagctctgtgcacagtttactgggatacttggcagtgtgacctttaggctgctccacagatgtgtcaaataacaaggggaaggatgtcctgctaggctctgtagatgtgtctataaaatccatggacctgggcagaacatgttggtgctttcttaaatcccagcactcaggaggcagaggcaggtggatctctgaaggtccatggtgagctggatctacaaagagattcagacagccatggctacatagagagaccctgtcatagtaaagcaatcaatcagtgaatcaatcaatcaatcaatatatcaatatatcaatcaatgcaggcaccaatttacttaattctgggaattttataagtccaaatgtcctgaggcagaaatcattatccctttcagccctgtgcccagcctgtcccaagctctaggagtgaagaacccataacacagtccccaaggccaacctaggagaaatgcagatctgcacagtacagggggaacctggaccctgtgctgggaccaagccacctcctcctgccccccatgtctcctgtgcctggctcacctcactgacaccaagattgccacctgcagtgacgatggcacagatgacagaatgtgattatctctgacagtgcctgattgtagtacatgttctaataagtcttaataataaaaacccagaggcagatattagtggatgaaagttgaaagaccagagaagcaaaaacatgcagccactacctcttacctctacaaatgggcgatcctgtctccatgaatcctcagactgaatgctctatctacaaaacctcacactgcaccctcacactgcaccctcacactgaatcctcagactgcctgtctctttgctccttatattctgctctctgcctgaccgtatccctgtcttctctctagagctgaaattaaaggcatgtcatcccaagtgctgggatcacctttgtgtgagctctgttgctcttttagacagtttcaatctcttgaagcccagggtggccttgaactcacacagatatgtctgcctacgtctcctgaatgccgggattaaaggtgtgtgcccccactgcctggcctctatggctaactagtgcttagctctgcaatctgatcttcagatgagctttatttgttaggtcataaacaaagtatcactacaccctatggtgtaatcttctactgtctctgtcaatccataaacaggctgaggactttactcggtactttctgaatcacaggatggatctatggttggttccatggatctgtcacacttgggccaacatcagcctcctcctgcaatgcctgcagttgagtctctttcctccattggttcctgtcagctgcagttgctccctctactgctaacccagagctctggaaggaatttgatagtagcagggttcacctgggctacagggttagaaatgaagcagagactgtctcagactgctgacccactgtgtgcaaagctcacagctgctgaacaagggatgagaactaagcttgaaggtgctcacccacctcacccacagcccttaatcctggttgacccacccaggactttcactttgatctgtacagagtcatgcagtctgtaaccttcacccccccagtcacctcgggacctgctgactctgagaagatctggtgttttgggctcctccctggccacatctgcagggctcagtttctgtgtctttactgcatccacagtggcaccagtcatcccagaaggatagtggagggaagaaaaggaatttgaagtcagagcaggagggaagctaaggttgccttgaaggcttggtgaatgagtgatgccaaccacagattctggggagtcccatctgcaccctaaaatctatatttccccactgaggctcttctcttttgggtactctctatgccagataagaaagcctgtgtccaacactccagtgggacaagaattctttggggtgacaggagtagggacctggagatggccaactgggaagtcccccaaggaggggagacaccaggagggcagagcttgacttagcggggggtctttcttctcttagctcagtcccacactgtgacctgacctaatgaaaacagtccctctgaggttgggagtgggacaggtcactctgagtttgtactgaagagctgtgtctgaattctgggggagggagggtgttgaccatgctgagactctccggccgtcagtggtttgggatcctgcccttctttccagggtttattttaagtgtcccattctctaggagtattattttgttttggttgagacagagtcttactctgtagttctggctgtcctagaatctgctttgtagaccaagttggactagaactcacaaaggtccacttgcctcttcctcctgagtgctggtattaaaggcgtgtatcacccacggccagccatgactgttgtgctgtaactaaaaggcctttccaagggcaggaggagccaactatgtacaagtcagaagctcatctggctctccatagctttcctttgtctgtgtcaaatggacttagatgctccttagacattctaagggccttgttctgaggtgacatctttatcctaggggaagctgtgagaggattcctttggggagaattctgatgagggctaaagccattactgcacacctttaatcccagaactcagcgggcagaggcaggcaggttcctgtaagtttgaggccagcctcgtctacatagtgagttccagtccagcctggcctacacagtgagatcctgtctcaaaaagagaagaaatcattaaaccatccaatgcctctctcagttacacttgaccccaacctcttggaccctcatatcctgggtgcttcatcagttctcaaagactatgactctgatgtcaccccccactgtcttctccagcacaaagtgtccccctttgtccctctgtctgagaacccatccaccctgattctctagtgggcatctcagctcagcattccctaccgaggcttccacgaccctcctcatgcatccctgacagtcctcctcttcttcacctatggccactctgtcttcctccaggacagtctgcagtgctgcctgctgctccagcccctccctgtcacacccacagttagtccaggaggaagggctgtgatgtcctctgcagagaggacccaggatgcctcacttcccgtccccctgacttcacaggggaagacactggagtgtgcttcaggagcaggacactgctttccccaggtccccactgtctgccccgctcctcccctgctacagttccctccagcagatcctgatggaagagaaattgtgcctctgttccctctgctcaactgctctaactcctgtcacactgtgaggacaggtctgtgttgtgtgacagactttccctggaaagacacacacacacacacacacacacacacacacacacacacacacacacgtccattcatctcagttaggggactcacagctgataaagtaaccattgcatcagtgcgcagcctggtgagccagtgagttttattggggtcaccaacaggagtgtgggagaggggtaactcacaggggcaggaacaactgacagcccacagacagcatgactgaaaagcccaccccgacacgggtaacaactcatggaacttcctccctggagcttctgcacagcttccaggcagctaaaaggtcagagaattctctcacagctggatggtcagtgtgctcccccaggacatgttgctccttgtcatacatcagcagtggaatcctagagagttgtcagagtttgtaaaataagatgagaagaccccatggagcttctattcccagaaactatttggtggctccatctatagtgggagctgatgccctcttctggcaagaagtcaatagatcactcaaatacataacaaataagtaaataaatcttaaaaaaaaaagattatgatgctgggcgttggtggcacacgcctttaatcccagcccttgggaggcagaggcaggcagatctctgtgagttcaaggccagcctgagcacactaacacttcattgtctgttaaaccagcagtgactttctctgaaagagatgctaggcaagacaatcctgatgttcctcagggcccaccaatagttgcctctagacccatcaccagactgcaggcaaagcaggcccatggaggggaggaaagtgtagtcaggctgtgaggaagggcgccacactactaaagagcttaataattttgctaattcattcaagaagaagtctgaagtatatgtctgggaatggattttaagtgtgtggaataatggtggaaggaacattaaaactgggtcagattaacacttttgatatgggtcctctagatttaatatggaagatctcacagtttaaaaaagagtcaaaggaaacttaaaagaataaataaattatatatgaaaaagtttgaatgattggcagaagtacttgtcaaagatggctcattgatatgacattggagatgcctgatatcccgtggctgggtgttgatgaaaggatttgaaatctcagggaagttgcaatgctggagtgtaagatgctgtgtaaaacccaatcctccacagttgggaggccagaagacactctcttcactgattctataagacacaaatggtgaagggggcaccggcatgtttgaagagttttgttgtcgcccttttccttgacctgacctcagggttggacactgttgctcagttgggttaattaaaggcaatgggtttaattgggtcccaaggtatcaggcaccaaatggcagcaagggattgctaaaggcaaggtgatcatagttattgtagcagtcatcacaggcaaagttaattttttggtggcatgaatcacatggacctttggtagaggactaaccatggtgattccaggcatgaaataaatacaaagctgtattagctagtgttctattgctgtgaagagacaccatgcccatggcaaatgttataaaagaaagcatttaattggaacttgcttgcagtttcagagggttagtccattatcatcataatggagagcatggtaacatgcagccagacatggtgctggggaattgctgggagttctacatctggatcattaagtagcaggaagattaagaaccactagaaccaaagcctgttctggagagatggctcagcagtcaagagcactggctgctcttccagaggttctgagttcaattcctaacacccacatggtagctcacaaccatccttaatgagatgtagtgttccattctgacctgtaggcatacatgcaggtagaacactgtgtatataataaacaaataaaccttaaaaaaaaaaaacaaagctgaacaccagtgactcatatcctcagacaaggccacacccactccaataaggccacacctcctagtctctctcaaacagtgccattctctgatgaccaagcattcacatatatgagcctatggcgtcatctttattcaaaccaccacattccacttttggctcccataggttcctatcaatatcataatgcaaaatgcattcagtccaaaaagtccccagagtccatcacagactcaacactgtctaaaagtccaaagttcaaagtctcttctgagactcctggcaatgtgtgagctgtaatcccagtaaaatcaaaataaaagagtaaagcacaaaattctaacctacattggcccctgatacacgttactgttccaaaggggagaaaagtgagcacagtgagcaaatactggaccaaagcaagaccacaatccagctgggcaaactccaacctggctctccatgtatgatgtcaaagcagtcttcaatcttcaactccttttagctctgttgactgctacacgtttctctcttgggctgggtccatagagttttagcacctgtctttgagaggcgtcccaggactatgtcatcccttcataaaatggcctctctgggcctccatgcagggacaaccctgacacacacagctgacctctgctgcttccctcagccacagagagagattccacaacccatggacaccttctgccatggaaaggacaacactttgttcttcctggagcagatacttattctggttatggatttgcctttcctgcacccaatgcttctgccaaaaccaccatctgtggacttacagaatgcctcgagcactgccttgttattccacacagcattgcttctggccaaggaactcacttcacaccacagaagtggaacagtagcccatgatcacagaattaattagtttcaccaagtccctcaccatcctgaagcagctggcctgacagaaagatggaatggcctcttgaagacacagttacagagtcagttaagtgacagcagcctggacagctgaggtggggttctctagaatgtggtatatgctttgaatccatgtccaatatatggtacagtttctcccatagccaggatccatgagtccaggaatcatggatggaaaagggaacagctccactcactatcaccttagtgactccctaggacaacttttgcttcctgttcctgcatcttaagttctgctggcctagaagttttggttttagagtgaggagagctcctgccaggatccacaacacacattccactgaactggaagctcagactacccattggccaatttgggtttctgaagtcctttagtcaacagtcaacgaaaggaataatagtgcaagaaggcgcgattggtccatgttgctaaaggaaaatttgtttgcttctccacaatgaccataagaaagattatgttggggctggagagatggctcagaggttaagagcactgactgttcttccagaggtcctgagttcaattcccagcaaccacatggtggctcacaaccattcattatgagatctggtgccctctgctggcatgcaggcagaaggctacataaataaataaataaataaataaataaataaaatcttaaaaaaaaaagagattatgttgggatgaggtgcttttggatgtgcgctgggttgtactgctgccgggaaactctgcatggtcctgctagcagcggaactaataccttcaggcactatgtagcatcggccacaggctgaacagcctttccgctcaccacatgccacaaccagacacttgtttctacctgtgtaacttatagatatgaggagtttggttcgggctcagctgtgccaggccccacacaatgcagtcacgctagagggtctcagttggccggattccccgataggctaattacatctgtcctgacgaagaagtaagtcccttattaatgaaaataacatggagacgaatccaaaaaaaaaaaaaaagaaagattatgttgccaggcagtggtgcacccctttagtcctagcactaaggaggcaggtgaatctctgagtttgagaccagcctgatctaaagcatgagctcctgcacagctagggctacacagagaaaccctgtctcaaaaaacaaacaaaatgtgttagtgttccattgctgtgaagagacaccatgaccatggcaactattataaaggaaagcatttatatagtggcatcttgacttgccaatgaacttgtggtggtggccataccatttgggcgtggtttcaggtacagacatgacccattataaggtagaggaggggctgggtcgggctctcttgggttgcagagaacatcagaagggcagagactgcatcttttggagcaggagagcagaggtggttatttattctttctgtgtaagtgcttccctaataaacacctaataatcattcatcttgggtctggtggactcatttaagtcccaccttcacatttaattgggctggcttacactttcagaggtttattcctctgtcatcatggcaggcagacatggtcccagagaaagaggtattaatctgtgtgtttctacatggccttatcttaccagagaacgcccctcgtgtcctatgttcccagtagctctagcccacaggaccttgaggcaaggactccatcccctcctcacacctcagaggaacagaaagccaagcatctgccatatttcatagcatctatcccaggtgaaatccagccgttccccaccagactgtcttttaccagtaaacaggttagccagactctgcctgcttcccgtcaggcttcctctgaaatgtgtcctctctgggggacccatctgctctgcagattctgacgtgagactgtttgtttcctcatagggagagtcctcctgtaatagattttctgtaatgtgataatagttttctccgatgatgcagtaagccagatcaagccgaaatgaaaaattaaaagagcaggtatatttgaggaaagcaactccctggtgagttctgcaatcccagagatggaggcaggagaagtcacaggcctgaactaagtcacagagcttgtagagcttgtaggcaaggggtgaaggtgtgtccaccacaagctgggtttatgtcaaagtatggtcaaaagctgagcactgtcttaaacaggtttctgcttctggcagagtaccagttgctgactacaggctgtttctagtagattgtgaaccctggacttgctgtggatgtgaaccaggccagctgatatggacatcccctgtctctgcaacagaatctgccaaccagaagctcctgaaggaatccccattgcctaaattcccatttttgcttttgactagcatttcagccttcttgggtccctgactccgtcnnnnnnnnnnnnnnnnnnnnnnnnnnnnnnnnnnnnngcaggaagtagcatggaaatgaatattttccctggttgaaatgctaagtcagaaggaactcccttgcatgggggaaatgccaatatgtctcactccctgatggggacaatggagagacagcaattccatgattgaaatttcaaaaaaaaaaatatgagggaatgaagggaacagctccccatttcggcagccataacagctgaacacgtgtggagtcaaaagcttgatgcaaactgcacgaggctttattatagttgtttaatgagctaagcccatattagctcgggcctttcgtccacccgccatggcagatggctagaaaagacatcttgaagtgtctgcatagagatcttatagggcagcgtaaggggagtgtctaggggtacacacaggctcaggattggtgtgcctccaggcttggaggccttgccctgtgttgattggttaacaggttgttatggcccataggccctccagggtggttgctatgctctgtgcgtcattgctgtgcacttgtccgtaaagcatacccagagctgtaaagcatagcaccgacagctaacctctgattggttccttgccatgagacaggcatctgacctcctagtgactaaggcaaggtcagacaagcacgtgttcggctgttatggctgctgaaatggggagatgatcccttcagtgggagaagagaagagcagagcagagaaaagagtagagagagagtaaagagagagcagagagggcataaatggtcagggattaaaggggtcctctgcacgtgtgtgcagacttagttcccatggaaccctgggctgacctgggtactgcctgttccaccaggtaacagggacaggccagcataatgcctgaacctttcaatcccacctttacttattattttaaaaaaaggtggggtgttagccatggcagattaaggaataagggtgtcgaattctcaagactgcttcctgatgacatggggggcattgaccatctttgggagaactgagaaggttggtgtgctgccacgtcctggggtagctggttgtttcattgcagaacgtgctgtacggaactccctggcacctcttagacctggcaagatgttggcagcagaggacaaagttaagtttagaaaaaaatttttttcttaggtcctgtcacttgaggggaagattagattttaagatgagggaatggttcccaaggggttccaaatgagggaagggagtcctgggaccagggaaagattgaataactggagtgaatctgacctgtttagatccaattcggctccctggaacttacaagaatccttagactttgtggaaacataagtattagacacattagcagcatattcacattagaagcaacttggctgaaagtattaccattttaaaattgacagatattttttggacaatgaaaagcatcttagtcttgaccttgtagttataatcatatagtggtactgtagaactttgttatgaacactagcatgagaaatagagaaatccagagcatacttcattttttttaatgtctcaacttactttatcatcacttatgcctttttaccctcagaccttcataactttaattcatacaccttacattaccatcttagaccttccattctcagacctttataccttccattctcagacctttataccttccattctcagaccttcataacttgcatttatccaccgtgttagacctttccatcctcggacctttgtaactacattctcagacctttatatatctttcactttcctatcttaacatagataaaacccaaaatacttgttcctgaaatctgttttgctttaagctggcaagactaccagtcgtcaaaagcatcagagttcttgagaaggataagattttacagaatcaatgattaaagaataacaaagacttgccagaaggctgcatggacagccatccccaaggtcctccatccatagtagcgggctgcaggacacctgccttcttgctgatagcatgtgacctgtggattactgactacacgaagactcgcctaccattgacccaagagacgcagggtaagtatacaggtacagagacaagcaagactggataagaataaaagggggaacaagaatgttatctctgatctgtacattgtagaaaacagacaggagatttaaagggacagagtagacttaaacagagggccnnnnnnnnnnccggggaaagacacagtattctgaaaaaaagccatgagcaacagaaccagtgaaagaagaaatcacagacaaaaataaataaataaataaataaataaataaataaataaatagcaaaaaaataatctgacagaaagcaaaagtctggctgccaggtttgctggcacaggccgctggagtgggtgtgcctacaagtatgtcacatgaccaacatggcgggcccccaggttagcccacatggtcaagatggcagcccccaggtcagaccatatggccaagatggtggcgaccataagccgattttttgtctatttacctgcttgttggctgcaactagaaagtttccttatgcatttcccatgggtgaggcaagtggaaaaacctgcaaaagctcctctcccgatgcccgtcggcccgtgggagttgccaggggcctggccccaaaggggccacagctgtccctgaaattgataaaggaaccaaaaaacaccgctcccagagcagggtgctagacttgacctatgggagatacacccaacaagtgaaagaagaaacaaaaaatctggcatcagtgcttcactgaactgagtgggaaggcctaagctaggtcacgtggccaggatggcatcccccccaggtcagaccaaatgtccaaggtggcggcccctgtaagcacattctcaactgccggaagaaattttctccatgagtgaggcagtgtgaaaaagtgaaaacaaacgaacaaaaaaacctctcagagcgtctcaagcagacactgccaaccaagaagaaacagggtcagagaacagaagattagggacattcccaggtgaaagtaagttcccactgggaggcagaagaactatgctcatttatctactccctggcagtaaccgaaagttctcgtaaaatgtatttcctgtgggcaaggccaaaaatgctctctatctgagagcacccagcagaaagcccgaaagaggtcagcagtctgaaaccgaaaaatggacccagtagaccaaaaggcagtgaactccaaaatggagtgcttggtctgccccatgggaaaagtaagggagtatcttaccggattgcagccaacaggcagatgagtgagttcagagatccttagtttgaaaagctctttctctgtttgtcaaggttcacctccaacctacttctgaggacttaaatttcttaaaatctatcactgcctcttgtaaaacctgtcagatgtcaaaccctaactccaaatatcataatgaagggacctgctccccatttcggcatccataacagctgaacctgtgcttgtctgaccttgccttggctaataagaggtcaggtgcctgccttgtggtaaggaaccaatcagaagttagctgatggtgctatgctttacggctctgggtgtgctttacaaacaagtgcacagcaatgacgtgcagagcatagcaaccacccacccctagacactccccttacactgtcctacaagatctctatgcagccgctttgagctgtctttcctagccatccgccatgacgggtgggtgaaagacccaagctaacatggggttagctcgttaaacaacaataaagcctcttgctgtttgcatcaagcttttgattccacatggtgattggggtggccgaggtcctgggctgagatcctggaagcctgagctttccgggggtcttacagtaactccccttttcccacccaccaggctaggggctctctcccagggactgactggcaacttgactttacccacatgcccacagtcaggcgagttaaatacctcctgcactagtggatactttctcagggtgggtagaggtgtttcctactactaacaagaaagctcagaccgtctctgacatccttctcagggaaattattccccggtttgggattccagcctctcttcagtcagacaatggtcctgggtttagccctcagatctctcaaaccctgtctaaagctctcaatattccttggcattttcatattccataccacccccagtcctcagggaaggtggagagaactaaccattctttaaagactgttctggttaaaatgtcacaggaacttcaccttgactgggtaaagcttctgcctctggcccttttcaggcttagggctctctctaaacaactgcttttcatctcaccctttgaactcatgtatgggcagctggctctaacacctggcctctcatctaaactctcaccgctccctgaccacctgtttacacctttacttcatcatctctgccccctcctatgggaatttgctgactctctacctcatccatgtgctatcccctatacctccccaattaatatcagggatcaagtacttctttctcttccagaccagggcccctccctctgtctcctaaatggaagggccccttcaaagtaattcttgtcactccaacagcagctaagcttgagggccttccccactggattcacttatcccacctcaagccctttacttctccacctgagactcacccttcatacacagtttctacaacaggaccctgttcccttaggtttcagaggacactgaaatcatctactttgcctcctatttcagaagaataaggctcaannnnnnnnnnnnnnnnnnnnnnnnnnnnnnnnnnnnnnnnnnnnnnnnnnnnnnnnnnnnnnnnnnnnnnnnnnnnnnnnnnnnnnnnnnnnnnnnnnnnnnnnnnnnnnnnnnnnnnnnnnnnnnnnnnnnnnnnnnnnnnnnnnnnnnnnnnnnnnnnnnnnnnnnnnnnnnnnnnnnnnnnnnnnnnnnnnnnnnnnnnnnnnnnnnnnnnnnnnnnnnnnnnnnnnnnctagatataatctaatgtgtctaatctttatgttttcacaaactttaaggattctcataatttccagggagcagaatcagatccaaacaagtcagattcactccaggtaatattcaacctttccccggtcccaaattcccttccctcatcttgggacacctcgccatgcagaggagctaaaaactctttcaatgagccgtgtccagtggtgttaccaccccccctttttttttactggaatgcaatgacacacagaacaaggaatgtgaatggggagcaacccaaacattgaccttccagggcatttgagggaaggatttagagggctcccacctggttccgccctggtaatagacaagcttgcttgtatttctgtcttacctggcacagggagatggtagcatcatcttgagatttcttcgtccctatttccctaacctgccatgcccaattctccaacttttataataaacaacagccgggattgtaagaacaatacacctggacgaccccacccccctaacgacaggtggggcacgcacaggaaaacttgctaagtcatcgccacgtcacctgccatgcattgcagcctgcgtgaggactctgcgcatgtgtgaaaccccagtgcgcatgtgcaaccttccctttaaaaggtccagccttccatttttctctctctttggctcctctggggttggctgacaacccagctccatctcccgcccccccagcccccccattgttcctttctttacatcagcagctgcaactcaaaaagaataacactcagcagttatgaacacttgttgatcttgcagtggaccaggtctctggtgtcaatacccacattaaatgactcacaattgcttataactccagttttggggtttctgataccttcttctgacctccttgggcatatgtgcttacatggttcacattcacacaagcaggcacacacatgcacacataaatataataaataaatctttttattttttgaaataggatatatttgtatagctttgtaaaccatgctggcctcgaactcacatagatccacctgcctctgcctcccaagtgctaggactaaaggcgtgtgccaccaccagcaaccacatggtggctcacaaccatctgtaatgaaatgtggtgccctcttctggcatgcaggcatatatgcaggcagaacactgtatgcataataaataaataaatctttaaaattaaaaaaaaaagcagtataaccatttcttcagtatgatggcatttccagtgaggactagatcatgaaggctctgacttaatggacattaaccccttggtggattcataataagacagcattactgagagttagaggatggtaggaaatggaagttactggaagatacattttgccctggtctcttcctatacctttccggccaccaagatgccacttttctctgccaggacaaattaaaatctttccaatcttgagacagaataagcccatccgacctcaggaattgtgccacaatgacaggaaaagtaagaaattcagtatttctgagcctgggtatgttttaagggcatttttgaagaatccattattctgtctccccacccatcattttgtttgggtttttgttttttcttttgttttttgtttttcgagacagggtttctctgtggctttggagcctatcctggaactcactctgtagatcagagagatctgcctgcctctgcgccccccccccccagtgctgggattaaaggtgtgcgccaccaacacccagtgtttcattttgttttgtacattctctgtgtgttgtgtggatgcacatacccatgtgtgcataagctggaggaaactggagggtgatgcttgctgtcactcctcaggtgctgctacccacatttgtgggtttttttgttttgttttcttttgtttttgttttcttaaaaaaaaacggggtctcttactggtcccaaatttgttaagtaggcaagtgagatccagtgagatccagggacacagctatggggaatctacccttgctctgccaccccagtgctaggactccacgtgcatatggtcgaatctgactttttacttatctattatttatttatttgcacgaatcctgggaacaacacaggtccccgtgattatgagtcaagtgctttactgacagagctgtctccccacccatcatgttgagtgtttgatatttgcattgtaatttgcaatagtgggtcaggaaattatcttgagggtgagacagcaagcaaatgtaaacacatacgaatacagctttattaattgtagacatgcagatgcagatgtgccggaggcactgatgcattgtgggaacattaattcagatttccaacacgcaggacttggctttttctccttacatgccctttacctttttaaaaatttagttaaaatataatcacataattatcccctttcctctcctcctccaactcttcctatgtccccctagcccctcccaaatagatggtctcttttcctgattattattatgattttattataaaattacttatgatgatgattattgttgtcacacacacacacacacacacatttaaacacaaatatataaatacaacctctggatgggtgttatggtgcaagcctttaatcccagcactccagaggcagaggcagaggcaggggcaggtggatctctgtgagtttgaaaccaacctggtctacaagagcaagttccaggacagtctccaaagccacagagaaaccctgtcttgaaaagccaataataaataaataaaataaataaataaataaaacttctggagtggagcccaggactgaccactttgtattggataatcattagcgggctcatccctggggaacctaaccctccctttctcaacagtttttatttgcttatagtgttagacccccgaaaactcaagtatccggggtcccaggccacgttcgcggtcaccccaatcaccaggcggattcgagagcttgctgcaaactgcacgaggctttattgtaatttaacgagctaaccccatgttagctcgggtctttcccccacccgccatggcggacagctagaaaagacggctcctaggggctcccaaaagatcttatagggctgcgtaaggggagtgtctaggggtatgcacaggctcacgattggtgtgcttggagagcttggagggcttgccctgtgttgattggtcaactggttgttatggcccataggccctcccagggtggttgctatgctctctacgtcattgctgtgtgcttgtccgtaaagcacacccagggtcgtaaagcctagcgccaccagctaacctctgattggctccttgtcacgagtcaggcatctgactttctagtgtctaggacaaggtcataaaagcacgtgtttggccgttatggctgccaaaagggaagctggtcccttcaccacatttcatatagaaatgaacactagtatgctaagggtcagaatcacagtccctttactaagcatgggactctcgagtttcctcccttccacactagtgtgtctgttggttttgtcattgctcaggtcttgtttaggcaaccacgttgttgacataccatggtgtaggttctctgtcatctcacaggtttcctggtcctttggagctacagtcttccttccctgactttcccagagttccctgagccttaagtgcaggagtgtgttccactggggccgggaaccccaaggtcagttctccttcaactctgtagcccaggctgtcctgagagatctgctgtctccacctccccagtgctgggattaaaggcatgtgccacaacacctggttttcgaattttttcattaatttattttttaaagatttatttattatgtatacattctgtctgcatgtatgcctgcaggtcagaagagggcaccagatctcattacagatgttgtgagccaccattgaactcaggacctctgatcaacctctccagccccttctgcctcccaagtgctgggattaaaggtgtgcaccaccactggccggctaacacctggtatttaaaaatcacttttcaagatgaataaatttaaggtttagacaatgggcagttttgtataaataccaaaagtattgttttttgtttgacttaattttttttttccgagacagggcttctctgtgtaacagtcctggctgtcctgcaactcactctgtagaccagacagactggcctggaactcacagagatctgcctgcttctgcctcctaaatgcttgggtcaaaggtatgtgccacaactgcctggctgcaatggactaattgtgttatcttttagttttgaaagggcacacatattaaattattgggtttctcagaggcacttgagaaagctatcatacaccaggaactattttgcatggttggtgcaggaaacccacttttgcacaccctaacctctatcttccagagaggtagaacttgttatgagataaagtcttgctgtggtcgaggctagtttcaaactcccaagctcaagggattctccagcctcagtctcttcaacaggtgcagtgcagatcactgtgccaggctagaccaaaggattgttttttgtatttgaagccctctttgataacaaccatggcctgagagtctttgctatagtccttggaatacaacccaatctgtttcccaggggaaccagaacacatgaacagaccacaaagatttatgggggaactatattcatgtgtgtgtgtgtgtctgtgcgcgcgtgtgtacgcgtgagcatatatgtgcaccatgtgtgtgcaggagcccaaagaggtcagaaggcatcaggtccccggaactgaaattatgggtaattgtgaactgccatgtggattctgggaaccaaacactggtcctctgcaaaatcacatgtgctcttaaccgtgaggtcaactctccagccctccagagtctattttccccttgtgaaacttgatcctaatggtctcctacacaggaggaaaccgcttgattgaaccatggatcaaaactcaggctttcctgctcctatacagggaaggcagctctgttgagtgcctgcttggcaagtgcatgagagcaggttcatcaccagcaccacataaaaaccaagtgatttgatggatgaatgtaattccagaactggaggtggatcagaagttcaaagtcatcagctcttacataggaagtttgtttgtttgtttgttttttggttttccgagacagggtttctctgtgcagctttggagccaatcctggcactcgctttgtatgccaccaagcccagccttagattttgaggtcttatacgctcagactatgccaagtttggcacacacacacagcctccttcttctgctgtcttcagatcaagatgtagaactctcagtgccttctccagcaccatgtctgcctcgatgcctccatatttctcaccaccaggagaatggactaaacctctgaaattaagcgggacccaatttcagagctttcctttataagagttgtcatggtcgtggggtctcttcatagaaatagatcccctgagataaggcatgttccattgtgtgcagtcaaagtgtgattgcgtgaatgtgagcacatgcacacacacacacttgtccataaattagatttagtatgcaagagccaaggaccatcagaaatgaattactggataagccaagaacataagctaaagatacagactccaggtatgaggtgtgcttttacaggtatctgtagacccagacaggcacaacctctagaaatgaactgccaaatatcattgttacctacacactacttagtactttttactgacttgtggactcagtgggaggctgactgagagacaaacacaaagcaaggttacagtagattgttacaaccatggtcccaggaaaccaataaacccagtgttctcgtcctggtcttgtctcttcctcaaggaatccggccttggagatgtgccttgctttggccaatgggacattaagttactgagtgttttggagcagttagggaattaactccttcaaaatcccaaatgtatcattgttgcgtatgggacattatgaaaaattttttaaaagatgcatcagtagttaagtgcgacacagggtaaaaggcaaaagggaagaaaacatcactcccaggatactgaattttgtttctatttctggggtaacatgatagtctgcagtcaccatagaagatatcacagaagacacgtaaatttagatctgccatgtttatcaccttttacattgttacttcaggcctgaaccattttccttatgactttataaaagacaactctgagatgaggaaagggccaagtatacccagaggacatgaacagtgtctgcctccgcatctcaacagtcaggaccacctctgtatggactctgctaagaaggtacaccgacatgtaagaaattctgaagcaagctgggcgttggtggcacacgactttaatcccagcagtctggagggagaggcagacagatctctgtgagttccatgccagcatggtctccagagtgagtgccaggataggctccaaaactacacagagaaaccctgtctcgaaaccccaccaaaaaggaaattaatttctgaagcatgatatccaaacacatcactgtgttgagaatgcaagggtggatgggcagagagccagagaccaggtggtttctcaagatggctgaggactggaaccacgttgacaccaagctatcccagcaggtcacagtaaggaagacctgttgtcactcttcaccctgcctcaccccaattaggctccatgtcttgtcactcccaatctgttgggggcctgatagtaagtggtgcagcattcttccggccagccgttgtttaaggagcttaccccatgttagctagggccttccatccatccaccatggcgaatggctggggaaaaattcagagaagccacaggatagagatcttatagggcagcataaggggattgtccaggggttctcacaggctcaggattggtgcgcctccaggcttggaggacttgccctgtattgattggtcaactcgttgttacggcccttgggtactcccagggtgattattatgctctgcatgtcattgctgtgcacttgtccataaagcacacccagagcggtaaagcatggcactaccagctaacttctgattggttccttgccacgaggcaggcatctgaccacctagtgaccaaggcaaggtcaggcaagcaggtattaggctgttatggctgcaaataaggtgcagaggacccctttaatagacagatccctgggctggagagatggctcagaggttaagaacactgactgttcttccagaggtcctgagttcaattcccagcaaccacatggtggctcacaaccatccgttatgagatatggtgccctcttctggtgtgcaatgagatatacatggaagcagaatgttgtatacataataaataaataaaatctttaaaaaaaaaaagacagatccctgcccatatatgctctctctacacttctctctatatactctatactctcctctgtgcttctgcttctcttctctctctccctggcgaacagccatggccggtagcccttaaccctgtttctcttctcctttagtctccctactctgctggacctgtaatatactggttaatatgtctaatatgtctcttagtcttatgtctcatctgccttttttcttatttatttttaacttaaacaaaagaataacacttctaacttgtgggcatgcaccctctaaacatgttaaacattttaagtcatttctgatgggttgagaactcctgggaagaagctgtgtctgtgaaggctaactcattagatagtgatgtggagacaggttggacagttgcaggcctgaaacctacttacgttttgtcttgggctatctttagccttctaaatagcctttctcatgcctacctctgtgctggatttaacatcctgtgataacagataaaacatgtattaatttaataaatctctaatttttgccaaccaaagactaagtgtgaccagatagctccaaatcatttcctgtacttgtgcttctcttcctcaaagacactggaggctccctgtaggggacagaggttgtgtctgctcttttgtcccccagattccaaccacacacctcagcatcactgagaagcagtgcagacaattccagactggtggcacaggatgcttcccactgtgttctggacatccctgcctagcactgataaacaccagtttatatcaactctgatttaagactatttgggatccagatgacaaatacaacaaatctcatccctgcagaatttcaagtttaatgcagtaagcagagcacacacaaatgaaagccaaagggataaataccatggaacatataatacacatgagtgtgcattgatacttcaattgaggtagtggtcttatctgaaatgagaaatatgcttgctacagccttgtcatcatcacgtacctgaagatggactgtatcaaatgtttcagaggtagcaatgtactactttactacttaaacattctgagtatcctttaagttatgcttctatttcccctgctttagtactaggcaaattaagttctaggactacaaagtaagggtaactgtatttacaaacaagggaatgcacagtttctcactaagtagaaaggacttctgtcttctggaaaggatgattttttggggggggtaacaattacatacattaaagaagatttattttatgtgtatgagtatcttgtttgtttgtatatacctgcaccatgtgcaggcaatgcctgcagaggactgaagagggcactagaaccccaggagcctcagttagagtgttgtaagcttccatgtggtgctgagaactaaacctgggtcccctccaagagaagcaagtgctcttaaccactgagcaatctcactggctccaagcatataatttctgaaaatacatgaggatataaacaaattttggaaggggtggtgtacatgccctactctagaaaaagtttatctgcacacatatgaagagaaatctgtgcttaggagagtagagtaagacatggtgcaccccaggctgacaggatggactgcacaaagctagactgcatctgacccaaggaactatacaggagcaaggttcgaaccttaagcatcttgaagcctggcagtaaggatctgcactccacctcagcaactaagtaggtcaggtcctggcgcttggccccaaggtgagcagcattttctcgaagcctctgtagaatgtcctgctcttcttcttccagtctggaaaggagagtctgctgttcctcatccagcctcctgtggagctcttcaaactcctttaggatttgctgtctgcggctctccactagtctctgagaacaagggaggatgctgtcaggaccaggaggcctgaaggagcctctcccagacccaccaggctcagtacagacttccttgtcacatggaagacttcagcagtattcatgtttctctccctgtgaggcaagtagtcacctgcacaccccccaaaggatgacttgatagttcaaatcagtgggaagatttaaaacaatcaatacttgacttttttaaacctaaattaactttttatattttaaagaatacatttaagattaaagaactcaatgatgtgaagatatccactgttagggatatcagagatatttttgctattttctactctgatgtttggcttatacagtctgttaaaatacaaatactagaacctgggtgttggtggcgcacgcctttaatcccagcactcgggaggcagaggcaggcagatctccgtcagttcgagaccagcctggtctctagagtgagttccaggagaggctccaaagctacacagagaaaccctgtctcgaaaaaaaaaaaggaaaaaaatacaaatattagaaagccaaagatttccatccctaataaccatgacacattaatctgataaaaactagagaacaaatagctactacaaccaggatcagtttaatgagttgatgcaaagtatatatttagacttcagggctgaacttgttttgcttgctgtttctatttgtttgttttgttttgttttgttttccaaatagggtcttgtaatatatagcacaagctagctttgaacttggaatccttctcccacagtctttctccttgaggacagcagcctcctttttttattatccctggagagctacgaggtgctcttgacaggcctgtctcttgagagtgagcctcagaacttcaatggaatattcctacatctcatgcaaagggacagccacctctccactgctcgtactcctgtgctcccaacccttccaccatcttgtttgcacacagccccacccacaggcttggcagaatctggctcctcattatcactgctctgaccagaggtgacctgatgtcaaaagggaggtgaagtgtcatcactcctaatgggtttatccttcttcacatctcactaagacactgtatggatttccctttgttacttcctccaagtcactactaacccgtagcttccaaaccaagacctaactcagacagtcacttacttttccagggtacttttcacatcctagaggaaaagagaaaacaaagtaagattggtcctagaattcatgggtcatgaaggcaaacaggttctccctcctccccaacagtgctaggtctttaaactaggcaccaggcaaactgagggcccagtgcaaggggcttgcttcagagggacctctccaggacatattccagatattgtttagtaaattagatgcttaaaatttaaaacatgcactctgccctgtgcctgagagccttcatccagtagctgttgcaagcagaggcagacacccacagctaagcactgaaccctactcctggaatccagttgtggaggggagggggaatcagcaaaggagccaaggcagtgctggagaaacccagagaaacaattgacatgacctaatgagagcacggagatcctagtcataaagctggagaaacagcattggactgaaccaagccctctgaatgtgggtgccagctaggagaccaaaacaatctatgggacctctaacagtggagctggttatccccagaacacaaatagactttgggagcccacttcttatggagggatattattacagcccagatacagcaaggagggcctgggaaggagttgggaaatgggatgggtgagttggtagggaacatgggaggataagaaaatgggggatggctatgtaaaaatgagtagtaattaaagaatttaaattttaaaagatcaaataacacttgagtacaggcagatgcagccagtgtgctgtcagcctaacccaagggggaaaatttttttttgaaacatgctcttgatagcagcacatactttaaggtctggcaaacatccttaaagttgaagaatacaggattcagacagcagtcaccccattctctgagggtcatcagcacaccctcctccctctgtgccttcctgtaaagtgaccatccccagggaaggggtctaaggaccttgtgactgacagggaggcaccactcaaaagacaaggagagatgggactctgaaacaagagggcagggacagagagtcagtgccaggctgaagaatggctgggattaaacaagagccatgagcctcacaagcttggcagtcctgatctgaagctacttctactgccacagacaacagatgggctttcattgcagggctccttgctgctttctcaggcaggcagtggaacaggatgcattctcacctttgtcctgaacatggatttgcaatggggtggttttagaagcaggtgtgcttgattgtacttatgagattttcttttaggggcctgagacttgccttggtggttaagaatgcttgcttctccctgggagttggtggcacaggcctttaatcccagtactcctgaggcagaggcagaggcaggtttatctctgtgagttcaaggccagcctggtctacagagggagtgccaggacaggctccaaagccacagagaaaacctgtctctgtctagaaaaaccaaaaagaaaaaagaaaaaaagaaaagtatgcctacttctcttctcttccaggggacttgagcttggttcccagcacacacactgggtagatggaaaatgcctgtaactctagatcctagggatctgatttgttctcttctggtctctgagggtgtgtacatgggcaggcatgcacacatacatatatatacacatacacatacacatacacaaaaacaaaccacaaaaagagaacactgtattttgattttcttacacttcaccaccaagttgcttgggagtctgatgacatccccctcaggttgaactcacatttgtttcacctgataatgtcacacaccggtgcaagcctatgaccatgctacagtgcctttttacatatcagactgtattagaaagtacttctagctgggaggtgtgtgaatgcctttaatttccatattcagaaggcagaggcagacagagctctatgagttcaaggccaagtctggccaaaatagcattctaggccagccaaaaatgcatagtaaagctctatcacacattaaagatttctctgtgtagctttgtacaccaggctggacttttgtaggaactcacagagatcagcctgcctttgcttctcgagtgctgggtcaaaggcgtgagccactaccgcctgtcttgttggtaggtttatcttatctgaatttcccaggctggcctgttctggctctgaacttgtgaagtgaacttgtaatatttcttctccagcctcctctgtgataaccacaccctcttcataagcttgtattttctgcctgttgtggtggtgaactgatgcctttccctcaacccttacacaatttttaaattttaattttttttaaacagggttttactgtacagccctggatgttctcacttgcaaccctctcctgtcttagtctcctgacttagtctcctgagtgcgaggattatatgtatgttttatttcctcaaacttttgtaattaaaatttttcaatttacttttatttcatgtgcatcggtgctttgccttcatgtagggctgtgtgaggatgtaggatcctctggaactggagttacagatagttctgatctgccatgtgggtgctgggaattgaacctgggacctctagaagagcagcagtattcctaacagctgagacatctctccatgtgcatacaaactattttaaaggagttattgagtccaataacttttataattaaatttataattaaagacagcagttacatttcggttcaaatattaccatggcttcaggagaaatgccttgcataggctcatgcatttgagcactcggtccctcttaggagctttgcagaggttaaagaaccttttggaggtggagctttgctgcaggaagtacgtcacagggacaggctttgagagtttactgatttacccttcttcctgtttgctccacttcctgtgcttgtatcaaaatctgatttggcagggcggtagtgatactcgcctttcatctcactactcaggaggcagaggcaggcagctctctgtgagttcaaggccagccggatctaaagagagagggccaggataggctccaaagccacagagaaaccctgcctcaggaaaaaaaaaaacaactgatgtggcagcttcctgttcctactgctatatacactgccttcctgacattgcagactttccttctggaactgcaagctaaaataaaacttttaatcctaaagttactctgccgtcctggcactggcccggtacacccaggctggccttttgtaggaactgacagagatctgcctgcctctgcctcctgagtgcgccaccaccgctgccccatgtctgtttacttaaaaagtatttactattgtgtgtgtagtgtgcgtatacacacagtgagtgtgtgagcatgggggtcacagtgcatggatggaactcagatgtctactctgaagattcatttttacatttctaccttcatgtgggcttcaagtcttgattctgggacagcaaacatttgtatgcactgagccgtctcgtcaacaccttcatttcttctatccttctcctcagtacttaggtgataaagctaatgaaatatcacttctagagaacagcagtttccagttaaatcaagtaaagtgctgttgattggctcataggcaaatatccagccaagcagtgaaggcaacagattgcctgctctaccttgagctcccctggtttcttttcttcagaggctttgcagcggctgatatcccgaagcttctggttcaggagctcaaggcacttctgcagtttctcctgagggttgggagaaagtaggagaggagacatttggagttagaggatactcaagagcttagcccatttatcatctcttttgttttcagtcatgtgaatgtgcaaatgtctgtctgagtgtatgtgcgtacctgtatgctggtgcccacggaggcctgcagagtgcatcaatcaatcagatcccctgagactgaagttataggcatcagtgaactgtcagcctggtacatgctcttaactgctaagtcatccctatactcattgactattcttcccttgaagcacttgggatcaaatgcagggcctcaagcaggctggcaaatgctctacctctaaggcacattccccactcctaaatcatttaatttctatcctctcatcacttcatgatctaaccctcttccttgcctacaactggacctttcatagatgtctttttccctgccatgtctgtggcacacctgactctcctccctgaatccagtaggctagctgtcatcacttgtttcctttcccactctattttcttatggacaactgcccatcacaccactcctagttatgtttgttttgttttgtttgttctggtggtgctgagactccatgcagcgtgagtgcactaagaacacagtctgttaccaggtcacaccttccatcagctagaagttaccttttatatctctgtctatctatctgtctgtctgtctgtctgtctgtctgtctatcctatcactgtaaagtttccatcagccaggtcacaccctctcttagctagaagttacctcttgcacctcaatctctttatttatttatttatttatttatttatttattcattctttcattcattcattcattcattcatggtgaggtctccagaagcctggccagcttcaaacttgtggccatggatgaccttcaactctccttcctcctgcctccaccctctgaatattgggattataaatgtatatcaccatgctggtcttgatattcttttttaacctgtgcttccattcagatctaaccatttatcaacaaaacaaaactcgactataaattacctgaaatatttttcaaaattttgttaattaagcagaatgagtggaaacttgactgttagcatctatttttgttattattactaaaacatttaccccatgttctctctagtaatttaaatgttaaatgtcaaattacgcatcttttgaagaacatgcagactggttctgcttagtctgatggatattagtctaaagtgacgttagctattccccccaaaaaaatgagaaaaaagaaaagaaacagcctgagtaaataggcataaataaagaaatcaatacagtttcagttcttccaaaatatttttcagactcttttgctgttcacccattcgtttaaaatctgacagattccagaaccatacccaacagaactctgaagacttaattttattgcagtaggtcagacaaatctgtgggcactccccagtgctcctgttgagggggagggactagatgtcctgaatacccatgtacatagttctgaggggaatggagaggaacagagatagccttacctcaggagcttaaatccctctaactcagagagtatgtatgctctttcctgcacaggcctctccagtctggacacccacccaccttgcactcttttgtaacatcatccagttgcagaacagtgtgagcttgctgggtatgatatattgcacatgtcggacagacagcctcctggtcttcgtagcagaggaggctcattgcctcctggtgttcaaaacaaaggttttcttctctggttttctgtctgacgcgcttgagatatttggcgatttccaccatacttcccagttgtctattaggccagagattctggtattgggatgtctttcggcagaccgggcaagggaagtcctgctctaggtcctcccaacagcgggtgatgcagactttgcagaagttatgcccgcattcaaggataaccggctccttcagatattccaggcacacggagcagtttgcctccacttgcagattctccagggcagcagcggtggaggctgccagggcttcaaactctaacatactcctcttctctgccattatttaacttagagatggggagagagaaaaaaaatattagttggagggttacatttcttcttgcactcctatcctgacattagctcccataaagccccatcttggtatcttcccacctcttccaatagactcacctgttgctctgtttacagcatttgcgatttgtagctaatatacacttgccttttctgattcagcaaacaaaagcagtccctagttacctttttggttttttgagacagagtttctctgtggcttggaggcggttcaggaacttgctctgtagaccaaactagtctggaactctcagagatctgcctccctctgcctaacaagtgctgggattaaaggcgaggcccaccactgcccagccctaagtgatctttttcacctgtgttgtcattacaaacagaagcttcctttaactataatagatgaaaaaagagcctgatgttgtggcacaaaccaagaagccctgcatttctgaggtcaaggcaaaacttcaaggccaacctgggttcccagtcaggtgagagtattcagatctctaaagggtgggaaggaagcctaggaagtgagctttgtcacataagccaaagtactctagctggtagtggtaactgactgtgaggcaggaggatcagatcaatacaagcaagaggctagcctggtctgtaaagtaagatcttgtttgaaaattattttaaaataagatagttttcaaggtgttttgtttgtttgctctttctttctttctttttttctttttcaatgcagctttggctggcagtactagacctcattattatggatttttgtttttttgtttttaaccattttatttatttaatatgcatacaacattctgctgtcatgtatatctgcacaccagaagagggcaccagatctcataacggatggttgtgagccaacatgtggttgctgggtattgaactcaggatctctggaagagcagccagtgctcttaatctctgagccatctctccagcgcggatttttgtttttaaaagaacttcatacatctacattaaaaaaaagaaacaaaactgttttttactgggcggtggtggcacatgccttggatcccagcactctggaggcagaggcaggcaaattctgtgagttcaaggctggcctggtccctggtctacaaagctacacagagaaaccttatctcagaaaagccaaaaaccaaaaaaaagagaaaaagacctgtttcttatagtgtaacacatagaagttttagaattttttttaaaactagagtttaaccttgattgtctgctactcctttttcaaagggtaacacactgaatgagttacactacagtaacaaattccatacagggaaatgtgaaattgttgtgcccagattgctgaaccccaaaagaacccaccaacaaggagacaactcctcgaagcaaagacaaaggtttgtttattgactcgaggataccagctgcagcaaggaccccattgttttaagaacaaatggagtacccactttcaactgagggctgtttttataagggaaaattgtagggctggcagcctcaagattacaaaacttccctggttacacaggatggaacaatgaatatatgcttagcaggatgctgcagaggaaatgaatttgttaattatctcctgagctgagggcttctataatttataactgctgatcctctttggactagaggaatgtctacacagctcaagggtatgctatctggtctaagatcaagtgtcaggtaacttttgtttaaccttgtctgttgggctgccttttaggaactcggagaagtttaagagtttttctatttgggctttggaatccaggttttagacttttattaatgttctcattcaaaatcattcctcctttccctggacaagccaaaaggaagaatgcctagatgtgtctctcaggcattgatttttttatcagtttgccgctggaatggttgcaaagcaacacatatttcaactctaggagaacatgattgagcagagggtgatacctttttaaagagagctggcaagttccagccaccccatgccaccaacaaacacccctgactactgtgaaatgctcctggttgtcctggaactccgtctgcagactaggctgatcttgaactcacagagatcagcctgcctctgcccccaccccccaattgttgggattaaaggcttgccccactacacgctttgagtttagaatttcaaagttgatacagataaattattccttggttattccgtggattgactaggaattaaaagaaggaaatttgggctggagaaaatggctcagtggttccaaacattggctgtccttccagaggaccagggttcaattctcaccacccacatggcagctcacaactgtctgttattccaattccaaaggatctgatatccttatacagacatatatgcaggcaaaacaccaatcaatgctcataaaataaaaataaatggggttggagacatggcttagtggttaagagcactggctgatcttctagaggtcctgagttcaattgccagcaaccacatgatagctcacaatcatctataatgagatccagtgccctctaccagcctgcaggcagaatactgtacacatgttaaatacatcttcagaaaaaaaaaaaaacaaaaatgaaattttccatgtatgactgcacatgcttggagcatcagtagtcaaggctggattaagtatgaccaccatgtcaactgaaaagaggcaagcaaggcaggtgttggtggagcatccctttaattccagcactagggaggcagaggcaggcagatctctgtgagtttgaggccagcctggtctacagagcgagtgccaggataggctccaaagctacgggaggttatgtgattttgctggagaggtgggtctcacgatgcaaccctttaaaaaaaaaaaaaggtacatgagcttgttttgtgccgaagtcacaagaatgcccaaagagaccagggagacagaacactgatccaaataggggaggtttattgattgttctattccaccatgagggatccggtttagcaaagtgacagaacagcctccagagtaaagttcactgtctactgctagattataaagacaaaagttacaggattacatcagtaggtacgggctggattctgattggttgacttttgggaacaatcaggagaatttctcaatgtcattttggcatgaaacacctgtgcaacaattattttccttggtcagtgctgagaggaaacattctgtggtttctatggctttgtgttgttacttgaggtggactgttgttcatagataccaataattttcaaaaatgaatcctggatactacaatggaggttttgttttcttcctgagtttcttttgtggtcaaacagtttccaggaaccaagtatctaggaggctggagtgaggggtctgcagtctttgtgttcagtcttggcactagggtgagggaggccagaggatctggagtttccttgtgtcagagtcctataggtcttatgtgtagcctgtcatggctgctaaagcatgggatcagtgagggtcttgtccctttatttctagaagtgaagcctttaggtttagtttacccctttcagtaagaaatgctgattctagatttccaagcacatcattgtatgggggatgtaaggtagaaggggcaccagagccttaagacaagggctgctcactgggacagagtggtgtatggaaaatgggaattccctgaatggtggatgcagagatgtaaggagaggttaccgtgatgtccgctcccccaacaccacccccaccaaaaaaaccaaccccccccaaaaaaaaaaaaaaaaaaaaaaaaggaaaataatataaccagttgaaataccaaagaatacaaagtcaaacaaaattcaagttttatttatctggaaaacggagtgaattcatcattggtgtttgaagcctgaggctgtgggttctccttatcgaggtgggctatgtttggcagaggttctgatggtttgaaatctggatgaatcaaaggggaagaattagtttcccaagactgtggcacccctagtattgatcaggcttggctaccttgctttgccaccctccaacgtcctttctgttgggggcttcctcatctacccctgacactgctcacctgcctgattttccagctgggcttcaggtcggtcaccccagagcagatgcttggggtcattgaggaaccgctggctgcgctggcatgtcaggcaggtctgcactgtccagcgaagacccttttggcctagatcaaaagtgaggaaaaaaagaagagggtgaccaggtttctgagaaaagcgtcttatttttttggtttgcagttttcttctactgtcagcaggtaataaatgaataaatcttcaagaaaaaataattttattcatacgtgtacacgatagtgtgacatgcatgagattcatgttgagtatgtgcacaggatccttcaagtgggtgtacagcgtggaggacagagatctagtttgggtgtcttgctttactacaattctccatttcgttgtgggacagggtctctcactgaatctggagctagatgtttccagttagattggctgaccagagaggccccagaatctgtacatttttatctggctcccacgggtattggagataccaagtcaagccctcatacttgcacatccagcaccttgcacactgaacccgttcccagctctttgacagcaagttttcatgtgtgggaatcccaaccaatgtctgactctgtttatcatgacatccatacttccctgccacttcccgggttgaaggaacccaggactccactttcttccaacacaagcctttaaaaacactactctagtagctgggtgtgttgtctcacgcttgtaatcttaaagctagggatgctgaggcaggagatttcagggagttggaggtcaattttgggatgcagtgacacctgtgtcaaaaaaaaaaaaaatcacaacccaaaccaaggggaggttatgtgattttgctggagaggtgggtctcacgatgcaaccctgtctggcctggattatgtagatcaggatggccttgaactcatggagaccacctgcttctaccttccaagagcttggattaaaggcgagaaccactcagctggtggtacttaatgcatcctagagattaaataagcacatagggttaatttttttttttttttcagactacagggtgtcaggtagtccaggccggttttagggacaaatcagccgcagaccggcttcccctccaggaggaaggagctgctgcccaccacggcgccagggcgtcagcactcacgtctctggcgctgggtgcaggtgaggccggggatgaggagagatgagcagccgcgacagagcgtcctcttcaccgaggggtccctgggggaagagcagaggccgtgggcgccggctcgcccgggtcccggctccgcccgcccgctcgccctctagcccgcgccttactgccgcaggaccagcgtcttctccgtgtggcagtaaaacctcgccagggcctggttctccgggttctgcgacaggacgcaatgtgcagcctggggacaagaacggcagcccgggtcattccgcggccgcagcaccggaccgcccgcccgcccgcagcgttgtctcacctggtacaagaagctgagtctctggaaggcctcccggtccttcactgggcccgccatgagtatccgcccctctcggcggatgccccgccccagacccgcgcaaggcctgccgggaactgtagtgtcaggcaccacccgccctgtgcatccttgcctgatggaggccccagtttggtattcctaatgtatttattaggtagggccccgcggggctagtggagcaggtaaaaatctcaaaacagggaaatacttccaggacggacgtctagacttgtcgtgtacggagaggactgtgtgcagtatacacatcaggctagaccctcttactctcctgaagccaaagacagatgtctggaacatccgtggactgatgtaacacaccaaaacaagcaatgtgtagcttcgcgttatatttgttatcccagcacttgccgcgaattacatacaaagtcaaaacgggccaccaggctggaccctggctcaaaaccagaaagaactggtacctgtaaggctcaaagtgggaaaggtcattgtcatgagggagggatacggaaactggacaaaacgtccctgaggaaagagtttgccctcaggagaaacaattttctcccactttcccacttattaaagaagacgcttgctgttacagtactggccacatggcagtttctatggcacagaaacctgccaacactatggcctctctcttgctaaccattactaactattccctcttaatggctgagcacacccaaggtcagaagcagagggattggagctgaatccaaagttgaggacttcaggggacatctcttcctgtcaccaggctcctgccaggatatccaggtggagaaccaggcttcaggctcagagtaaggagattagctgaaatttaccctgggggtggtgttttgtgagggcctaccgagtcagatgaggagtgtggtggaatgtagattcctagacctatccaaacctccattaaggacagagggtgagacccaagaacatgtatttttcatagccagtgagtctcacataaggccactgccaaatcaccacacaactcagatcacatcagtggatcctttgttccatattttgaccaaccaaattatcttgccacaaagaaccacagtcaaggcacaaaggtaagaagagagtggacaatgtcctgttgaggtgggagaacggaaatgccctcgatgcagtttctcgtctcagtcttgtacccaagcagcaggtaatccaggttgtttggtttggcatgcatctcatcaccttttgtgacaacatatgtaccctatgggttgtttattttggcctaacttaaaatgatttacattctctgaaaaggggaatgtcaaaggatggtaatagaggcgaatgaagctgtctctctgggccttttgctacaaaaactaccctcttctaccctgttctcacggggcgagaaaaactccatgacctttcttcctttctcgcttaaacacctaagccaggggtcatggcagacaacttgggaataactacttttaacatctttaaggccagggctttggacacaccattctctttcctccaatagctgactcttccccaagttcccttgggaaaactgtggaagggcagatgcctgtgtcctgtaggatcacttccatctcacctccagaggggagaaaggtgggcctacttcttggagacacccaactgcagggtcagggagaaactgggttctcctttctgcctcccttatccttctccacaaactccaacctctggctaatcctatgggtaatggtaacattaccctaggaagggaaaaccaaagagatccccctcttcttcaattcctttctagagggtcccgttatcctcttccctgatcctactcctgaactgaatgcccaatctctgccctcagaaaagcctctcaattctacaatcataacagcagcagccactcatctttccaacacagaggtacacaaatccctatgtgctccctcaaggacaaggctacccttgagtcacagaagcctcttaaaggtttctgtctcctgcactttaagcaagttaagactctttcatgtcgactttctatttctagagaggccttttctttacaatcagtcattgtgcagtaggaaacctgctggacttcagagattacaatcccctggggctcactctcccactacagttaagtagggacactcatctgtgctgtcaggcagcccagtcctgtctctactcgttcacacaatgcatcccagagaccaggtggtttctcaagatggctgaggactggaaccacgttgacaccaagctatcccagcaggtcacagtaaggaagacctgttgtcactcttcaccctgcctcaccccaattaggctccatgtcttgtcactcccaatctgttgggggcctgatagtaagtggtgcagcattcttccggccagcccggatccctgggtagaagaggggccaaagtttttcagtaaaagtgtcagtgaaggtatagatatgtgagcggtccgtgacgttgtaaaaagacaatgtgccggcctcatagtctaggaatatgcccaccctcttaggttaagtttctcagatcatgctggctcttgttgtattgaagaaagaaaaaaaaaaaaaaaagtcactgtctgaaggaggcagggagggccagaaagaaggctccagatcaagtgaactgcaagtgtgtgctggggacagggtgagcatggtcttgaatcctgtaacagtcctgctctgtgactgcttttctctacataaatgttaatgatgtttcctttggtcactccctttgattgatgcgtcaggaaccctttaaagtttctaggtccctagagagcagatgacacctaagcgttcttacctcaagtctatgatttaaggtggggcagggggggactggcactagaaagaggaagaggaagccaactccagggctctgaaccttccactcctctgcatgccctatgccagtttcctttggggaacaactcaccaattagctgtttgaggattttcctgaaaaaggtccccagaacactgtaggttggttaagtttctcaaatcatgctgactcttgttgtattgaaaaaaagagaaaaaaatgaaagtcactgtctgaaggagggagggagggccagaaagaaggcttcagatcaagtgaactgcaagtgtgtgctggggacagggtgagcatggtcttgaatcctgtaacagtcctgctctgtcagaagtacatttaggagcaaagttagtgtccatgcacaagtaggttacagatggttttcaattcttcaaatcaaagggaaaatggtctattcctctatagatatatctagcatgtgtactcatgaattcatgttttctgtccttttattgtaaatattcaatatggacacattcgaaattaaattagaagaaagaggttctataaatctgtcccgcagatttacctgctgtaaatcttgggcttctagcatcactcagaagatgagtgtgcggctcttggtgtaattcattcctctgttccagtgggtaccaaatgcagacttctcttcttgcagcctagaaggaaacagagactgtgcaggagttgttggcttagtttggagaatggggctgggggtatggactctattctttttggttgagaggcccagaaaacttttcttcctatgtactgatagaaatatctaaagatccagaaaatgttgaataaatttgttattatcaaataaatgatagatagcatccctctttatacttcttaaaatgaagtttatcttatttgtgtataatattcaagaacagtgtagcatttctttcatattcctcaatgattggaagcaaactaaagatctctaaaaatttttgtaaattgttttttttctttaaatgttatttcaatgcccagtatatggctagtatatggctagtttccagctgacctgcgctatggaagatgtttcccctctgtgtgcgcatagcccatccctgtcattcatattctatggaacaccagtttgtccacaaagtaattaacttcatagtgctccccaaactgattttgttttatgattttaggtctcgtcagcctatctcggcccctctcttttcatgtcctgacaaaaacaaggttaatttcatcccaactggatcagctttctgtcctgtaaaacttctaggccctctcctacctgcctctgacctgatgctcaagaactctcctaactctggccagagctcaactctggcaacactaaccgtagagcagctctcttcccgggtttccttcacgtctctttctgatgacaccagcacagcaggctccctggagacctctgtccagcagccatctcagcagcagcagcagcagcagcagcagcccccgttatgcttctatttcccctgctttagtactaggtaaattaagttctaggactggaaagtaagggtaactgtatttacaaatatgggaacacacagggtatcactaagtagaaaggacttttgtcttctggaaaggattatcttgggggtacaaattacatacattaaagaagatttgttttatgtgtatgaggagctgcagttacagagtgttgtaagctgccatgtggtgctgagaactaaacctgtgtcccctctaagagaagcaagtgctcttaaccactgagccatctcactggctccaagcatataatttcccgaaaatacatgaggatataaataaattttggaaggggtggtgaaaatctgatgtgcccaactctagacaaaggtcctctgcacacatatgaagagaaatctgggcttaggggaatagagtaagagagggggcaccccatgctgacaggatggactgcacaaagctagactgcatctgacccaaggaactatacaggagcaaggttcgaaccttaagcatctcgaagcctgactgtaagcacttgtcctccacctcagtaactaagtaggtcaggtcccagcgcctctccccaaggtgagcagcattttttcgaagcctctgtagaatgtcctgctcttctttttccagtctggaaaggagagtctgctgttcctcatccagcctcctgtggagctcttcaaactcctttaggatttgctgtctgtggctctccactagtctctgagaacaagggaggatgctgtcaggaccaggaggcctgaaggagcctctcccagactcaccaggctcagtacagacttccttgtcacatggaagacctcagcagtgttcatgtttctctccctgtgaggcaagtagtcacctgcactcccccaaagggagttgatagtgtaaatcagtagaaagatttaagataatcaatacctcattttttaaacctaaattaaccttttatattttaataaaaaacattcaagattcaagtactcaatgatgtgatgatatccactattagggatatcagagatatttttgctattttctactctgatatttggcttatacagtctgttaaaatgcaaatactagaaagccaaagatttccatcactaataaccatgacacattattctgataaaaccagagaacagataagctactacaatcaggatcagtttaatgagttgatgtaaagtatatatttagacttcatggctgaacttgttttgcttgctgtttctatttttttgttttccatatagggtcttgtaatatatagcacaagctagctttgaacttggaatcctccttgaaaggttcaggcattatgctggcctgcccatgttacctggtggaagaggcagtaccctggtctgctctgggttccatgggaactaagtctgcatgaaggtgcagaggacccctttaatagacagatccctgggctggagagatggctcagaggttaagaacactgactgttcttccagaggtcctgagttcaattcccagcaaccacatggtggctcacaaccatccgttatgagatatggtgccctcttctggtgtgcaatgagatatacatggaagcagaatgttgtatacataataaataaataaaatctttaaaaaaaaaaagacagatccctgcccatatatgctctctctacacttctctctatatactctatactctcctctgtgcttctgcttctcttctctctctccctggcgaacagccatggccggtagcccttaaccctgtttctcttctcctttagtctccctactctgctggacctgtaatatactggttaatatgtctaatatgtctcttagtcttatgtctcatctgccttttttcttatttatttttaacttaaacaaaagaataacacttctaacttgtgggcatgcaccctctaaacatgttaaacattttaagtcatttctgatgggttgagaactcctgggaagaagctgtgtctgtgaaggctaactcattagatagtgatgtggaggcaggttggatggacagttgcaggcctgaagcctacttacattttgtcttgggctatctttagccttctaattagcctttctcatgcctacttctgtgctggacttaacatcctgtgattaagagataaaacatgtattaatttaataaatctctaatttttgccaaccaaagactaagtgtgaccagacagcatctgaggcctatagctgagattactccactttgctgtatacatttcaggtttccaccaatgttccttaaaagtgccttgctctattctttttttattgtgttctataaaacttcatgaaaccatttctaagttgaagcatgtaagttgggttaaactaaatctgtgtttcaaggccttggtctctcatatttgccttcagaataaattcttatcccctgtgatgggtggtgagagttgttttttgtgttgacagagaataggtatttaccattccaggatcatattccagatattgtttagtaaattagttgcttaaaatttgcactctgcctgtgcctgagagccttcatccagtagctgttggaagcagaggcagacacccacagctaagcactgaaccctactcctggaatccagttgtggagagggagaagggatgagcaaatgacccaagacagtgctggagaaacccacagaaagagttgacctgacctactgagagcatggagatcctagtcataaacctggggaaacaagccggctgttggtggcacacgcctttaatcccagcactggaaggcaaaggcaggcagatctctgtgagttcaaggccagcctggtctccaggtgagtaccaggatagctccaaaagctactcagagaaatcctgtctcgaaaaaacaaaaaacaaaaacaaaaacctggagaaacagcattggactgatccaagccctctgtatgtgggtgccagctaggagtccaagacaatctatgggacctctaagagatgaaccagagtttatccctattacacaaatggactttgggagcccattccctatggagggatactattgcagcccagatacagcaaggagggcctgggccctcccccaaatgacatgacagactttgaaggttccagtgtaggagttggtggatgagttgggggggggctgttagcatgggaggatggtagggtgagagaatgggaatatggatatgtaaatatgagtagtaattaaagaattaaataatcaaataaaaagtgagtacaggcagatgcagccagtgtgctgtcagtctaatccccccccccaccaaaaaatctgaaacatgctcttgatagcagcacatactttaacttctgtaaacatccttgaagttggagagcacaggactccgacagcagtcaccccattctctgagggtcatcagcacaccctcctccctctgtgccttcctgtaagtgaccatccccagggaaggggtctaaggaccttgtgactgacagggaggcaccactcaaaagacaaggagagatgggactctgaaacaagagggcagggacagagagtcagtgccaggctgaagaatggctgggattaaaaccaactccagggctctgaaccttccactcctctgcatgccctatgcctgtttcctttggggaacaactcaccaattagctgtttgaggattttcctgagggcaaagtactgccgggggaaattactgaagttcttttccagctctatagatactgttgtcacctccatggtcttcaccttgtcacatctgggagggatgggagataaagaaagcaaggacagggtcagggagagccccagccgaatgatcatgtgagtggtgtggtgtgttttctggagaaaagtgggacaaggcctctcccacagtctttctccttgaggacagcagcctcctttttttattatccctggagagctacgagtctggtctacagagggagtgccaggacagcctccaaagccacagagaaaacctgtctctgtctagaaaaaccaaaaagaaaaaagaaaaaaagaaaagtatgcctacttctcttccaggggacttgagcttggttcccagtacacacactgggtagatggaaaatgcctgtaactctagatcctggggatctgatttgttctcttctggtctctgagagtgtgtacatgggcaggcatgcacacatacatatatacacacatacatatacacaaaaaccaaaaaaagagaacactgtattttgattttctaagacttcaccaccaagttgcttgggagtctgatgacatccccctcaggttgagctcacatttgtttcacctgataatgtcacacaccggtgcaagcctatgaccatgctacagtggcttttcacgtatcagactgtattagaaagtacttctagggctggagagatgtcacagaggttaagagcactgactgctcttacagaggtcctgagttcggttcccagcaaccaatggtggctcacaaccatcccttatgagatttggtgccctcttctggtgtgcagatatacatggaagcagaacgttgcatacatgataaataaattttttaaaaaaagcacttttagctgggagaggtctgcatgcctttaatttccatattcaggaggcagaggtagacagggctttaagagttcaaggccaatctggcctaaatagatttccaggccagccaaaaatacatagtgaagctctatcccaaaataacaacaaagcaaaacaaaaaatcccatcactttatgatgttattggataggacagtctctttaaaattatgtaggtaggttatctttttttgaggtagggtttctctgtggccttttgtaggaactcacagagatcagcctgcctttgcctcccgagagctgggtcaaaggcgtgagccactaccgcctgtcttgttggtaggtttatcttatctgaatttcccaggctggcctgtgcaggctctgaacttgtgatgtgaacttgtaatatttcttctccagcctcctctgtgattacaggtgtgcacaaccacaccctcttcataagcttgtattttttgactgctgcgttggtaaacagatgccattccctcaatccttacacaatttttaattaaaaacaaacaaacaaacaaacaaacaaacagggttttactgtttagtcttggatgttctcacttgcaacccgctcctgtcctagtatcctgagtgtggggattatatgtatattttgcttcttcaaactttaataatttaaaaaatttaatttacttttatttcatgtgcatcggtgttttgccttcatgtagggctgtgtgaggatgtaggatcctctggaattggagttagataattttcatctgccatgtgggtgctgggaattgaacctgggacctgtagaagagcagccagtgctcctagacactgggacatctctccatgcccctacaaactgtttaaaggagttattgagtccaattttggaggttgaggtgatagggaagcaaaggggcaaaaagttggggtaggacaaatttaaatcacagagggaatgttttgaattgcagtttaaatacacctgaaataaaaatttataattaaagacaacagttacacttcggttcaaatattaccatggcttcaggagaaatgccttgcataggctcatgcatttgagcactcggtccctcttaggagctttgcagaggttaaagaaccttttggaggtggagctttgctgcaggaagtacgtcacagggacaggctttgagagtttactgatttacccttcttcctgtttgctccacttcctgtgcttgtatcaaaatctgatttggcagggcggtagtgatactcgcctttcatctcactactcaggaggcagaggcaggcagctctctgtgagttcgaggccagccggatctaaagagagagggccaggataggctccaaagccacagagaaaccctgcatcagaaaaacaaaacaaaacaaaacaaaaaaacaaaacaaaacaaaaaaaactgatgtggcagcttcctgttcctgctgctatatacactgccttcctgacattgcagactttccttctggaact

SEQ ID NO: 2 - DNA, 931128 bp, synthetic construct
  source 1..931128: mol_type = other DNA; note = LOC100768845 Contig Sequence
  misc_difference 1..931128: note = N can be a,g,c,t
atgctcaggaagagactagatccccatctttcactgtatgtaaaaaaagaactgaaaatgaattaaagacttaaatatgaaatgtgaagctagccaagtgttggtggcacacacctttaaccccagcactcgggaggcagagacagatggatctctgtgagttcgaggctagcctggtctaccgatcgagttccaggacaggatcaaaaacaatatagtgaaaccctgtctctaaaaacaacaacaacaaaaatatgaagctgatattactagaagaaaaagggttaaatgctccaagacattggcatgagcaagtactttctagataagaccctcaaagaccagaatcaaaagcaaaattagacaggcaggatttgccaaaccagggttttggtatagcaaaggaaacaattgagagaataatacagtcacagaataggaggaactcattgctgtttataaactctggttaacttataagactttcacaggattgagatcattaatatttatttcatcatcaatgggggaggagactatgaggtactgtccttcccaaaggaactcttgccaatgaatagttcttggcaggagggtgtcaatttcttcagtagggtaaccactaataagttgcctttgctccactaaataactttccacccaatttgggcaagtaactcttattaaactcagtgggctacacatcaaaataagacataacttgctgtagagaagaagggttctagtggaagagatatgggaataaaggagggaaatggttagtgacaccaggtcaagtcatgagcacctgacttggatgtgaggtactaaactcaggtcctctggaagagctgcaatccttcttaactgctgagccatctctccagcccattgtaactgatatgccttacataaaagattcatgaatttatataatgagttttagtcattttcttttttccagacagggtttctctgtggagttttgaagcctatcctggcacttgctctgtagaccaggctgaactcatggagatccgtatacctctgcctcccgagtgctgggattaaaagcatgggccaccaacgcccgatgagttttagtcatgtttactgtccattatttgatttaattatgtcctcttgtggcctcctcaggcatctgcattcacatgtgcatacccacatatagacacacatatatacatcaaagtcacaaatataaaactttataaaaataggcaccttttctgcccattaacagtgaaattccctccacaaaattaagagatcttatttataataacatgaaaaggaataaaatatttagaaataaaattaactaaggaggtaaaaagacctgaaaattgcacttaaaaactataaaaacctcatactaaaaattgaaaaagccacaaataaatgtaaatgcatcttgtgctcagggatcagaataaagaatattgccagatctctgtactattcaaacaagtctatagatctactataatctctataaaattatgagatcatttttccattgaaatataaaaatatatctaaattttatatcaaaccaaaaagggacaatgatatcaaaagcaaccttgaatatccaaaataaagctggaagcatagcaatctagatttttaaattgtattacaaagctataataatcaaaacagtctgaggagctgggcctagtgctatacgtgtaatcctaccatgtctgtaatctcaacactaaagaggctaaaacaagaaactcagaacttcaaatctaccctcagctacacagcaaaaatcctatctgaaaaaggaaaaggaaaaaaatagaatcagaggaaatctttgccagctatttatttaaaaatgactactcaaatgaataaatgcaaagtaccaataaatatatgtaaaagaaatgtttagcaaccccatccaacagagaaatggaaatcaaagctacaatgagattttatctctccctattaagaataactatcaagaaaacaaacaaaaagtgtggcaatgattggggtgggggggttgatacatttttggtcagaatgtaaattgcaacatccactgtggaaatcaccatggagtttccaaaacaaagaatagaactaccatgtagttttgtataaacagtgaagaaaacaatagaaggaaaaaataacccatcatataagaggacatagctgcctaccatgtcactgtctattcaaaatgtataaagattttctaaaagtcagcagcaggaaactccaaataatttaatttaaaatgatcagaggacatggataaccacttttccaaggaaggagtacatacaagtggccagaaaatatacagtaaaattcgtggagcaggagagatggctcagctgtgaaatggtcttactgctcttgtagaggaccttagttttgttctcagcacctatgtcaggtggttcacaaacacctgtaattccagctttgagggatgcaatgtcctcttttgaccttcacacacatgcacaaacccacttgcagacacacatgcatatgcataattaaaaatgaaaatatgtcttttaaaatttgtttaaaaaatccttatggtcacctgatcatcaaagaaaagcataatgagaaaccatatcactctagttaaaatggatattattagaaagaataagttctggtgaagatgtggggaaaaaagagaaatcttgcccactgatagtaggacggtaaattagtacagccatatgaaaaatgacatcgggatttcccgaaatattaaagcagaagtgtcatacgactagccactcaactgctgactacatctgtattcccatgacagttgcagcactattcaaaatagccagtaaatggggtcaatctaagtatctgttgatacatgacttgataaagaaaatgtggtttgtctacaaatactattcagccttacaagggaagtcatgccaatttgcaaccaacactgatgcatctgaaaaataagtatgctaagtgaaagaggccatacacaaacaggcagatagtacgtgaaataacctatatgtaagctgtgaagtgtttaatggcacttgtcaatgattaaggggtggggaaatgcaaagaacttattttaagcatacaaactttcagttttaaaatgagtgtgtgtcacagataaaatgaacagcatagcacagtgactatggttaattatactgtgtcatgttctaagcactaagttttcgagtgttctcaccatatacatgcatacacataaagataactgtgcctttttgaacatatatgcatatatgtagaaatattaaatttaaaatgcataaagcatcatggttcttttttgttgtgtcttttaggtggttggttggctgtgtaaagatgaaacctattgattagttccttcacagccactgaagtatcagaaactccctgaagtggatgatgaagacaagcttcatactttggttcttttttgtctgtctgtttcttgagacaggatttctcctattagaaacacgtgtccacagaagtagctgggtggagagtggaagtgcttatgttttgagtcagttgtgggaataacaaacatggtttttcatgaagcaaagtgtcttgactcacagtgtagtgaacttgcttttgaataaaggaaattcttattacagaccaaggaggactggagagaggaatcctaattctgtccgtggatgccaatctgagtattctctacttggtcattggggggaaaaggtgagcgtggatatccctggactgacagacactactgtgccttagtgatttgggcagtgagctagcagaatccaaaagatttttcatctctccaaagaagatgatgtccaccaagacattgtgagaaagttcttaaacaaagaaagtaagcaagaagttcaggaccaaagcacccaagattcagcatcttgctactctgcatgttctatagcacaaacactgaagaaacagtgcactaagaaaaacaagggggaggctgctaaacttttggccaagaggatgaaggaagccaaagataaacatcaggaacagattgccaagagacgtaggctgttccttactgggtatggaaatggtatagctactgtgaaaaccaatatagagagatagtgacaaataaatgatcagatctcgaaaaaaatattatataccttgaatgtattcaagttttgtttttcatttaacctcagtaaagctagaaaagaaacaaaaataaatgatagggtttaattctgtcttttaacatcactgtttttattcaactccatctaactagaaaaccaaagcagaaaaggctgtaccaataaaaatatttttcaccatgtcttttgtgaacaaacaaaattttgttcttagatttaaagaacttggcagagtacatctttctggaacaaacacagttcctcattacaaagattgcatgccaaattttgcaaaaaaacaaaccttatggtgtacatagagttcataagaaagctcaggtggtgcccctgacaaacccaccctttgctcccccaaatacacataatttgtattttgtattggtgatgcttacatggttatgttcagctggatttgtggtaagtctgcaaagggctcaggtccttggtgcttcttttaaaacagaactcctggtcaaaacatatctgccccaatagttgataagggttcatttcagctctcactatgtaaaattctgtccaagggtttccagagagggaatggctggcatgtttgtgtctgtgttcctggtctttgcagagttagacgatttccatggcaaacatgtaattcgctcagcaggtaacatcatttcgctttctccaagacggtcctcattatacgatctgaaaggagtggatgcatattttatcagttttttttcatcaaatttcataagcatgccttttcaatcacagggtttccagaggggtcaagtattgtcaaacatgttttcctaaaattctattcaccaatatccctttaagtagatgttcttgttttaatttcagaaatcttgaagtgtagacatcattcactttatcagtatgcgccaagcagcagctgtatgcaagtcctggggtgaggagtacaacatccatgctttttctccaaagctcacaatccaggaagattatttttaacccatcagtcccaggttgagacatatgataccaaaatttcactaaatcaggaatagtagatgaatggcaaatggaaattaatgtgaggtaaattaaaaggtagaaatgactactgcattccgtatggggttgtaaagtggataagaaaaagaaaagagaagggttgctgtctttgattatacatgtacttattctctttgttagggttttgtttcggatttttttcactgtgtctaagtacctggtaaaaatatcataaaggaagatttatttgagtcatgacttcagaggtttcagttcattgtccccttacttcaaagcctgtagcaagggagacatcatgatggaaggccatgacaaaggagaggtgtttaccttttggcaaccacgaagcaaaaagagacagacagatatggggtatagagacaagatatagccttcaaagccatctctatagtgacataattctgccaactaaaccccactcctaatagttctttcagctctaatttcataaatggatggactatgttttcacaaccaatcactactcagtagtgttaagaagtagggaccaagacttaaatacttgagcctctgggtacatggaaagacattcagggattatcattttttaaaaaaatctgtactactgtttgaattggaaatgtcttctatgggcttgtatattgaatgcttatttcccagctggtagcaccatttttggaagaatgtggaacccgtaggaaatgggatctagctagtagacatggatcacagaaagcaaacttttgtagctattatccaggtccctgatttcatccttgctctctagttcctggagttttgtgatacaaatagccttttcctctcactctatgtatgaactcctgtcatgatggactaataccctctgaaactgtgagtcaaaatcaatttcccttcccttaagttgggagtagtgtttcaggcacagtgatggaaaaatatctaacattgcctgtgtctccgaatcaatggcctaccataaatctataagcttttttttaacaatgaagatgtatagtttctgaggaacagagaccaggggtatgcatttgccaagtcatgtatgtacccacacacatataaagacaggaaaaccttatctgtcacatatcttagttgagggggtgggggaggacaggtaggagaagggaactgggattgtcatgtataacaatcctgtttctaattcaaataaaaaagttgaaaaaaaagacaggaaaacattacataaaaatgtaatataaatgttttaaaaccacagagagtaaaactataaagatttggcactagattaaatgaagagacaaaaaataaagaatttgaaactaatattccacttgtaaacctagttgaataggaaagtcaatttccctttatgtaaatcttgaaatgtcaaacatgccattatcaaaactgtaaagttctctggattcagtccccagtgctaaaaaaaaaaaaaaaaaaaaaaaaaaacaagaacaannnnnnnnnnnnnnnnnnnnnnnnnnnnnnnnnnnnnnnnnnnnnnnnnnnnnnnnnnnnnnnnnnnnnnnnnnnnnnnnnnnnnnnnnnnnnnnnnnnnnnnnnnnnncacacctggactgaaacttgagcttgtaacactttattatatgaatatgaagctaaccaacatattcaatagcagagagaacaatacaccgtaacacttttcaatcatcactcttcttaaaagtttacagaaaactctggatatgagctgtggaggcagcacagtagacctgtatttgattccaagtaccaaaagtggggtacatttgtgcatatttgtagatatatacagattaagtatccatggtttctgaagggtctgattataaaaacttattcaatatcctgtgccctctactctgatacaaagagagttacttaagatatgctttctgaaagcttggatgccatttaagtgagcctattaatgagttattataatacctcaagactagagtactaaggaaatagggtattgagtgagtacagcaggatcacaaatgtctggaacatgaaaagtttcccatggagcataggtcataaatgaagtcggccttacctgtctgaaaatactggaaatttagatatgtgttgaagttgtaggaacttggaagagaaaaatctaacaaagaaaaatgtgttcattatacacggggtcttcatttactcagtcagcatggatgttctattacatacaaataccatagtaggcaatgtcttttttctagaattaattagtattctaatgttctattaatacataaacagtcttcacttttgtaaaacttagtctaatggaggccacagatatcatccttatgataaaaaaatagctctttaccaagaaattattaaaagaaaaacaaaaaaggaaatgacatagccaaatgcccagtgctggaaattagcaaagacctgtatttgtaccctaaatcatggcagaatgatcagaaatggaaatcctaaaagtgactaatgaacagggaattatatgatgatatccaagattcaggcaggaaaaaagatagaatctcagagtattttaagctgtgttttcctgatgtctaagaatgttgaacatttctttaagagtttgtcagtcatttgagaatcctctattgaaaattctctgtttagatctgcaccatatttttaattggattatttggtttgttgatgtctagtttcttgagttcttcatatattttggatattagccctctatcagatgtggaattggtgaaaatctttttctattcggtaggctgctcttttgtactattggcagtttccattgccttgcaggataattttagtttcacaaggtcccatttattagttgttgatcttagtgtctgtgctattggtgcctaggaagttatctcctgtaccaatgattcaaggctgttctctactttatcttctgttaggttcagtgtatctctggttttattttgaggtctttgatctacttgtattcaaatttcatgtagggtcataaatatctttctgtttgtatacttctacatgcaaacatccagttagaccagcaccatttgttgaagatgctttttttcccattgtttatttctgtatgaagccatattttaacacaaaactcatttatggtcaaatatgcctctcacacacagcataaagatagttgcacttttaaatatatgtacttattatttatttctgtgtgcatgtgtgttatgcttgcaagtatgtgtgttcaccacatatatatctgctgctcacagaggccagaagagggtgttggatcccctagaacagagttaaagatggttgttagcaactacgtgggtcctctgaaagagcagttagtgctcttaaccactgagctatctctccagtccaattgcactgtttttaaggtacaagcattttactatgatctacaatatgaagtctagcagcattttccaccttgggtggcatatttctttcacagcattttttattttggagtacttcagattttggattagggtcaaattttgtcatatctgaataagtgcatgtgaagtaagtcaggtggcttttgtagttgaggtaaaatgatggctttatattagagtgatatgatgaggatggagagaatttgattctgcagagtctgcgtactgaacaagtttgaagcaatccactgagattgaaaatttgagcctcactgcacatgtttcctggtcattgagctgttcagaaaatggctgaagctctggtacattctgaaggccatattgtaaatggccaaatcaggccttgggcataaaattatgcacaatatgtgtttagagaataatggtcactgaacatttctatattatttatttctaattctgtattactatctctatatagagatacctctatatagatatacattgatacatctatataaatgtagatatagatatggttggtcaaatatgatcttagccccagttaatcagcacaaactattggcttcaaatttggcaaaaaaacacaagcatacaacaaaatagcctctagtataccaagaaataaatatcatttcaatatggaccatccacccaatgactagattctaaatattgaagagctgctattgaacctagcacttggcaaaactgccaagggcaaagcaccacatgggtatgctgaggagtcagagtttgacagagtaatttcaaagcattggaatgggaaagtgaggaaagtcaattgtcttaggtgtaaataaaggaagcttaatgattccttctcctaaatcgaagagtctgctgattttttttcatgatttgctttcttcaatggtgtttttttatcctcttattttcagatttgtataagataatcattgatacagaaaagccctctaacattagggtggctgaataagaatctaaatatgttagcttacaagtgctttactgtccagagctgaggatggaatttgacatgtaagagtgctctaccactcagtatgtagcagtttatctcatgtatcttagtgggcagacatagtcccagtggtctggtcacctacctctaccctcattctatcatacctggtaccttggatcacctcccttatagtctacagcttaccttgtggatccacatctagctgcttgtctttcatttctatccttgcacaagtcctgccagcctcctgttcagcaactttcatctttatcagtgaccatgcctggctttaaagcaagtttctcaccatcactgtggtccttcatgacacatcattggaaattctcggaaaaatattctggatctgtaataataaatcagtgtcagcattacttgagggagggaacttcttataaatggaagcttgttgatctggtttgtgtgagattctctgggggtgggtccaaggagtatgtaattattgaagaatccccaaaggtgttttgatgacagtagatttatttcttgggatctctggaaactatttatctttgtgctactagagttttcagattctcagcaaatgagcaacaggtcaacatattatccctcatgttccatgcaggaaagaatttactatttcctaaagcatggcattgaattgaagtaatactaccacccacattgttgtgggggttttataattttccactcacaatggaaactataatctgttgaccatttagtacatgttagacaccaagaacagatttttactattttaaaatttaacccccaaactctcatgaacacttacattaagaacaggagaaaagcaacaaaagagttaagcaacttgtgttggaagaagtttctgtcacacagcagctcccaaataaacacactgagacttagtattaattacaaatgttcatccagtagctcagggttgttactacccaacctttacatttatgttaacacatatttcttatctattctttgccacgtgtcttggtacctttcctcagtgtggcatgcccatcttgcttttctctgcatctgctaacaactcctcttacactgtccttcttctttacatcattctcagtttggctttcccacctaactttatcctgttcagctactggccaatcagcttctttattaaaccaatcatagtgacatatattcagagtgtaaaggaatattccacaacatttccctttttttgtttaattaaaaaggaaggttttaactttaatatagtaaaattatatacaacaaaaccagttaccaagtaagaatcacagttacaatatctagtctatttgtatttggtaaaattagagaaaatattttatctatttttttctttgtgattgtaaagttttatacttattttaccttttatcattactaagtaaaactttacttctaattgtttagtctttaactccaacaaagaccacagaagggtgaaattttacctaatggcaagatcatctggatgcctggacactcacccaatgttttctgaaacactgaggcatctaactttggcttacaagcctagtatatctgacagacttttctgagaagcaaggaatttgacggactgtcttaccttgccttggcaatctggcagtcactttcttttgtatcatgctgttccagtttggacagtatactgtcagcaattcaggcaaggcagtttctttgcccacatgactagtttttgccataaataaagaaaactccatatggaggttctttgatgcccatcatcttttctgaagtagattggtgctgccaagagcagatatgtcttgctatcataaaaagtcttaggttattaaatatattaaatgtcacattctatagttctttgatgtgtttgaaggccacctatctatctaaatatatctgtgtatgggcatgaaaacatacgtaacatgactataagtttacctattatggatgaatattaatctgtatttcttaattatacattacattttaaatgagctgcataagcacaataccccagacaagagtagaaacatacagtataacaaattaactctaaattttcatcaataaaccaaaatccataccaatgtaatatatttaagattaatagttgcttttagattaaagtagattcaataatgtatcctctaatctcatcatttctatatcacccttttttcgtttagaaagaaatctttgaatttaactcctttgtttagctttttttttgccatgaccaataacaacttgtaaccaaccccccttaaatgataataaacacccataacctatcttttgtgaatgtgggcattattttctagactactactattgtttggagtcattggaatctttgggggaccctgaaaaaattcgtgagtatggtcaagtcctgactggaatattctgtgaggttggattaactcagccttgaagctgttctggatgctggatcacctgggccatctgtttttattgatggctggtctgattgttctgaaaatatataaactcttaaaggtaacatatgtatcttcattaatacaaatatagactctgcattgtataaaaggcagccaaagatgaacttttgttttatgtttgaacaggtaaaatatacattatatgtgttgtagttcttttaggtttctttctgtttgtagccaggattttcaggggatcttccttgatcaaacctgatcatctgtaactttgaatgaatacacagcctttcatttccagtggaaataaaagcaaaacctgttcttcaaagtaacatatcttttgacttccattttgaagtcatggcattttaaaaatatatagcttggtttaatccagcagcttttataatcaaatgtctcttagaagctattgctttttccttagcagtcaaaaaaattctctctctctctctctctctctctctctctctctctctctctggttttttgagacagggtcaaaaaattctaagacaacacaataacatacaatatccagactccctgtgtattttccatctttacatggctttttaaagtattactttacttccttttaaggactttagtattttaaaactgaattttttagatctatgactgtatatactttccctcttttctcttccaaggctatgtatatttttaagcatactataacccatttagaggactttttggtctggatctgtttgactaagcatctgccttgttttttgatcacatgagatgattcttaaacttatgtgtcagccgccaatagtgtagcttagcttagtgtattgtggtattgcatggtggctggcttttcctgtagacagcagctaggagacatgactctgaccatggccagcatgagagataatgagtataggaagttgcctgactccatttctatgtgtcctttcccaatctctctcaggttttatgtggatgtagttgccaaatgtttggacagcagtggttcttaacctgtgggttgtgaccctctatgctaaaggactctttcacatgggtcacctaagaccataggagaacatagatgtttacattgctatccgtaatcgcagcaaaattacaattatgaaatagcaacaaagattatattatggttgggggtcgccagagcatgaggaactgtattaaaaaatcacagcattaggaaggttgacaaccactgcccagggggcagtttcaaaccctggtctcctggttgcaaaattcccccacttaggaatttggccagcatctgattctaaacgagaggcacaactgagagtccagcacaggtctcccacccctgctggcttcttttgaggtttgctgtaagatgttcctcagcactggctggccaccttgtgtgcgatgactctgacaagatccacacgagctgcccaccatgaaagattcaatctctctggcgaatctcatgaaaatgactgtggtaacaaacctgaggcaataatcctaagtgtttttatatccctgctgctttcaggttgtttcagcattacagttctagctaaagtctccatttcttctattttgctgtgatgccgtgactcacagtgaaaatcccacagcagactagagagtgtcagtactgcaggtgaatctgctggcagcagtacaggtcccttgatgccattgtcttcctgaccattgtaactcctgcagtctcctccccatctgtaagcagtatgctctgctcactggcacagcaagatgcttttgttcaggctcagaaggagtggaataaacacaaaaaaggcagcctctactacatcgttgttaaactgctgtaatcacggtaaagtgttctggctacttacgtgaagttgatgtctctgtggcagagcttaagaagtggacaggaaacaaaggcttgggttgtttttttttttttttgctgttgtttgtttgttttattttttaacagttgggatgcccgtagagttattaatctttgtatcctatgtttcatttctatctattccccgggaacctttagcatactgactttgatcctactattcaaagggaacgtgtaaggtgggacagtttaaaaatcctattgtaatacactactaattgttctgatcatccaacagagttaaaatgtaatccttgtgaatcctcttgtttgtaaatgcagagaccattttagagccagaagatatagggtgttggaactaaagacttaatgtctgcatttccgattgccttcctcacgtgcatacagcccacttcatttttatattgtactgcacagtactcccattctttacttagtaaagcacatagtaaatgctcacctcgcaacacaatttactactgcagaaatcaaagtgtggctcattgcttcctgaataataacatattagtataagggagaaaagaatgatgtgaacaatgaaggttgtccattcagcctcagaagagctccgtgcagatgttaggagcccctctttgccacctgctggaatgccttttcaatgcagtgtgcataggcaagggggtatgggaatagtctgccactgacactgagatgacaaatcggatataaatgagttttctttgttgatttttcccaagagattattttttattatttcaaattagaaacaaacctgcttcacatgtcaatcccttctccctccctctccccccaactcgccatcaaccccccaccatatccccctctgctccccaggaagggtaggaccctccatgggggttccccaaagtctgtcctatcatcctgggcagggcctaggccctcccccatgtgtccaggctgagagagcatgcctccatgtgggatgggctcccaaagtcccttcttacgccatggataaatactgatccactaccaggggccccatagagtgccgaggtctcctcattgacatccatgttcaggggtctggatcagtcctgtgctggcctcccagacatcagtctgaggttcatgtgctcccccttgctcagatcagctgtttctgtggggttcaccagcctcatcatgaccgctttgctcttcactcctccctctccgcaactgggttccagaattcaattcagtgtttagctctgcgtatttgcctctgcttccatcagccactggatgaggggtataggatggcatttaaggcagtcatcagtttcattagaggggaagtgcatttagggtagcctcttgtcattgcctagattgtcagttggtgtcacccttgtagatctctggaaatctccctcgtgccagatcgctactcgaacctataatggctccctctgttatggtatctctcatcctgctctcctctattcttcccccgactcaaccttcctgctcctccatttcctccccttgcctcctcttctccccctctcattctcctagctctctctcccctacacttttctttgtcacatctagagacaaaagcatagatacgcttgtgagagagtccaggtgcagaggttgatgcattcaaggttatttctacccacccacagtgaagcagcaagggaaaacatacttccctctggcttcatccctctcaagacacacaggtctctagttgtctgcctcctgtcatctctgtgtacatttggacattatcttacaaaacaagtcaagtttggaaagacaaggtttacaaaggcagctctgactttcattttgtcccaaatatgaaaagcaattatctcaaagggttttttttttcctatgtcttcagagttaagcaagaatcatgtcatgaccagattatggaagtttctggacactctgtctacccttctagatgtttctttctttctttctttctttctttctttcttgcttccttgctttcttgctttttctttacttttcttctcctctctgcttccttggatatccataagaaagtagaagattgaaggttatgtggagaatcccatccaccaaactcaagggcagactaagcctacaatgctgacagcctctgttgaggaaggcagtgttctcagcacattacttaacttgaaaaactcctattttgacaactcgggtatttttatattattttttagtcattcctaggcctattgggataaaaatgatcttagtataatgaccacagaacaactccaaaggccagttttttcatcattattattatttcaagttgacatcatcggcaattatgccacacccccatacaaggatacaaggtagactatgtgtccctacagtgaactgtgcttaaaagtgtctatcctcccaagatgaatcagtacttcctagaagcattagcttaattggctctcaacttattcttccggagggaaaacatgggatgctactattaaaatccatgtttcgtcagtgggtatccatcaggagaggtactattatgtaattctgtgagaataactttctattattgattgcccacatgtcagataaaacatcattttctctaccatctgcttggaaatctctgacaggagaaaatgaatctgactaggcaaacattttcctcatgtctttggatagaatcagaccttttgtttggtgtttttgccccctttctccccaggttttcacctaacataatggctatttaaaaagacgaatgcagggtcgggggacccaaatcagcaactgggatgaagaaaccgttaaaagaatgctacactgcatttccataagatagagtgttaatcaaagcacaatattgcattatcactagcaaggaaatttgccctcaaaactggactcatcctttgttttcactcccaactctttttcctgccacctcccctatttttccccttctgctggctgtttggagcctcagtaaatcacgttgtgaaataagatgagtctgaatagcaaaagcatggagatttcacattccacagcataacaatgaactgccttatgttagaattcaagcttgttagtaaggctcacaaatattatcatctcctgccgtggcaatttactacccatcccaggaaagtggtttttcctagcagagccaacatgaaccatgcctcgcgagccgcagatgggatctcttcactgcagtttttgcgttctgcactgcacggagcccaattcatacttggaagcaaatgtgtcagcttctgtgacagatcacatggagacatcgtgttaatcacacgatgggaaaggtgcctcaaaggggaatttcttgtggagaggcaagtctgttctaagcaaaaggaccaatgcccaggcccaagcctgcagggcgtctcaagagaatgtgggtgccgcagtgcagtgtctgagcatgagagggaggtctgctggaggtgtttgtgcttgctgatctttattgaacaacacatttatccagtagccagagcagcccgtgctccccccaacctatgctttaataaaactctcagagttcaagggtaggacttggagttcacatggtaaatttagtaactagaaaaggttgagaagatggtggcaaattcattttgagaaaaccagacaaagcaatcgtggtctttgagagccatccatctctccctcccccatctctgctttctaccaagaggggctcagagcctttgaaaaagccagggaataaatatagtgccccacttcctgagaaatgcagaggagcaatccaagtgagcatttccttggggggggggcgtaaatgatccatgcttggagtgaaatggtaaagaatttgtttttctttattgtcatattaaagatcctgagccaattcgtgttagcaatctgaagacagagaaaaggtgaacacaaagacagtaagactttctgttcatctgattagaattaaattttcaacctctgaaagcctaagacgtagcacacttcgaatccttactgagggctaattgctatgcctagttaggagttagctgaagaaacctgtcttaaaattgacagagagatcagaggagagataatatgctgatgagaaaagcgtttgcattttccctaactcaaaaatagttttctaatagaggttttgacagggaaagttatcctttacaggtctctggaatagaaagagatgctttgatttctaatcctggagtctgacctgcaatgtatatcaactgtagattctttctcttgaaggcctgaaactaaggtcacatagaaataaaagcatatcgctgatatatatatatttttcatttttgtggaaaacttgaatgactacctatagtagcgatgggaacaatgcctttttttatttaaggagaaagaaagtttctcgaatatctctaatagaataaggcataaagggtcctgttggagcaggagtttctctcacctatctgcttaccacaggaatatcagcaaagggctgtgagcatcattctgtggtcccatgggggagagatgaggaagagttttggggactgacttgcttctaggaaatgaaggacaaagactctgagttttcagacatgctaaagtcttttttcttcatgccttcaagggctagcaatcaaaatgtttaccactcgtgcagagccactcatctcaacagcaaaactttgcctcaagtcttttatggatattgatattatcctatgtttctccttgtatcttaagccagtctcaaatgaattgtctggccaagactaactaccttcattatctatctcccaggcttctacctattacaataccctacattacctttccactcctaggatttcaggtatctagccacctgcatgcaacagaatccaaagtgatgcttttgatctagctcaaattccaatgcacatctgacacttgttgtttaaacatactatttctttcatttcccttacactgccttttactgatttttgttatctgacaactacttagacttttttttgcaagatttgtgcctcagtctggccttaagtgaggtgtttttaaaaggtatataagtcataagctttttcactcttcatgtccctcttaagctaggtcacatacatgcctaaaaaactgagcttcatccttgacttccttcttgtgattcaatcttgtatgtcaatccaagtgatatctctaaaccagaatatctaaatgaagccttccaccttaattttgaagacatcttccttctttaacctgctacttctcttttgttccctactgttataaatgacatcaccaatcagtacagagtggcaactctgactctgattctttagccccaccccatgtaaattgttacatagtaattcactcccaatataaacattctgttcttgagagtgtctcctaaagactctggatctaatcaagtcttaagactcaggaacagcttacagggctcagaaagctccccaaacttacaacaatatggagtgctggggaaatcagattctctgacccattgacttgccttcaagtcatccaaggagcatcagggatgcatctttcctgagtcattacccatgcttgtggacttttcaacaatttggttgtctgtacttaatcctacacacacacacacacacacacacacacacacacacacacacacacacacacacacacacctgtaagtaattccaatacaattattgattcacaaggttggactttggaggaattattactttggttcttctttattttcctacctgtggtaatgtttgttcatgtatctccagcaaaattcactctaatactaaataattttttgagataaggtctcacataaatcaggatggcttaaaactcacttcctatgactttgaatatctgatcttctggcctccaactctcaagtggtagaattataggcatatgatatgttccaggttgatttggtgctagggacaaaactgaggtctttgtacatgtgaggcaagcactctatcatctttactatgtccccattccctacattcagtcaattctatctctctgatcttcacaattctctcatatcacctggtctatagcaacaacagccatatcactgttgtcctcttacctcttctccttgtcaggacagttctcctgaactatattcaaagtagactttccctaatgaagtcactcttgtttccatcctgcatgcaattgtatgttatctcatggcaaggcctaaactttttgaagtcaatgcattattaattacttttgtatagctgtagcataaataccagcaagaacaacaatgaaaagctgtaatttgactacagtttcagaaggttcaattcaaaattgctcatccactgagcaaaggggtcaagaccaggctggagaaacccatagaaacagctgacctgaacaaggggttaggggtcaagaccaggctggagaaacccatagaaacagctgatctgaacaaggggttgctcatgtaccccagactgatagctgggaaactagcatagaactattccagaacccctgaaggaggaagtcaatgtggagatctggacaatctatggggccactggtactagatcaatattaacctctagtgcacaaatgaattttgggagccttctcctcatagagggataccctcacagcctagacacattgggaagggtctaagccctgctccaaatgatatgacagactttgaagatcccccaagaaagcctcatcctccctgggggagcagaaaagggttggaatagggggacagaggaggaggggagggagagggaactgagattgacatttaaaagaagcttgtttctaatttaaagaaaaaagggggaaaaaagaaaagaaaaaataaaatcataaacaaaaaaaatgctcatccccatgtgttgagcagaatatcatggccactggaacactggaatgtgtagagaaggaagctgtttacctcatggcagccaaattggaatgagagagaggaaatacaggaagagaccatggcaaattattggtcctaatggcatgtttcagtgatgtcctctttccaactagatactacttcctagctttctccacctttcccaataaattatattatgaatcaataggaagattaatccattcagttcaacataaccctcaggaactaattgtccatggaacctttatcattgacacaactaaagatgaacatatgtcatctcataggtgcttctcaatataattaagctggcattttgttttattgatatatgtatttttttattttttctctctttttatgctacatgccatttgtgtgtgtgtgtgtgtgtgtatgtgtgtgtgtgtgtgtgtgtttgtatatataatatatatggtatgtattatgacttgtgtcttagtatttttatgggattcctgagtgtgtaaacaagtgggtatctgcataaatatctgtttcttattcctcttcttgggctcttttccttctgtttgtttgttttgtcatattctgttgtgtgttagggtccataataagtcctcataaaagacaaccagtcacataagcaatcagcaaaggcgctttatttaatgttccaacatgttgaggtggcacatggcaaccacaagagaagcctgaagttcttttaaactgggttaggggaattccagggaggagagattaatctcaaggatgattggtgggtggctctagtggttagggacttttcagtggcaggatagagaaagctatctttagctatcaggagactgtggtcatctgctgaggcagcagaaggctgtggtcatttgttgatctctcagaaggcaaagggggccctgttgattggttgcccctacgttgtggttttccctgagaactgttttctcagctccagccacctccagtaaactgaaactaaggcctcggccctgacgggggctattagaaacctctcatggttctgttctgggtccctggcccactcaatgtgttagattttgttctatctattttatattatattttattattgcctcttagaagcctgtttattttctaatgagagacagaaagggggggtagatctcaatgtgaaaaggatgtggggaggaactgggaggagtagaggtaggggaaacattatgaactgtcatcaggatatatcatatgagaaaaaaatctattttcaataaaaggaaaaataagattagcactttgttacaaagttctccatcattttgatttttctgtctgaaccaatgtctctctgattattcctccttttatactccattccagattcccttgttaccgtcagctctgaagaactgccaatttctctcatttcccttgattttcatgcttgccaacttctgaaaacaattctaccctttcccatttttttcttgtagaaaatgccttcatgtttcctcttgttacttctttaaacaggatgttatgtttagctgcaaatctgcatactttcatgtaatacttatcatactttcaggtgtgtttttgcataactgtacacatgtgggtatatgtatacatatatgccgtaaatcaacaatgagtgatttctttagtcattatccaccttatgtgttgagatagggtctttaaaaattaacaatggtaccagttcaatggcttaaagattaaaaacacttgctactcctgcagaggacctgggattgattttcagcacccatacagtggtagctcacaaccatatgtaactcaagttctaggtgatctaatgctaccttctggctctgtgggtaccaggcacacaggtgcttatatatacatataagcaggcaaagacatacatacatattttcttcgtcagtattctattgctgtgaagagactccataaccatggcaacacttagaaaggaaaactgatgggggaagtccttctgtgtatatgcttgtcttactggctgataaataaagcactgttggccaataggaaagcaagatagatgggctaggagtctagaaatattcttggaaatgtagtaaagatggagtcaccatgtgatcgccagcaagagaggacacatacggctggcgtcctcaataagataagttcttacaaaatatataaattagtagttatggttgataattaagactgagctagcaagtaagaaatcctagtcattttccagcagcattgtacataatataagtctctctgtgttattttgggggccctaacattgtggcagaactcaggtggctggtggatttattgttatagaaaacatttaatttctgattgattacagtttcagagtttaattctttatcattatggcaagtagcatggcagcatacaggcaggcatggcattgaagaagtagctccgagttccacatgctggtccataggcagagagaggcaaagagactagcctggcatgggcttttgaaaccttgaagcccaccaatagtgacacatttccttcaaggttatgcctactaccagaaggccaaaccttctaatctttctaatcctttaaggggttccacaccctaatgactaagcattcaaatatatgaggctatggggccattcttattcaaaccaccacacacaacatgaaaataaataaatctaaaacaaaaacctagagctcaccaattcaatgagttccaggaatccacctttctcttccttcccagcactgggcttatagatgtgtactgccccatgtgcattttatgtgggtgctgaggatttgaactcaggttttcatgcttgcatgacaaacgtattaccatgacagcagcctcttcagtcacacttattacacttaagtaattgtttgttctacttaactataatctcagtgagggtaggaacctagtacatctttttcatcactttcttgcctgtaattagcacaatggcctaataaacatctagtgagagattgacttgttgaggaaagaattattgcaggaaagagacaagagtgagtactttacctttatttttaaagatttttttacaggcaattggaaatattagaagttattcaaagacttcatgatctctttaaaaggaatagctctaatccttagagaattgttgacccaaagatgtaggcctgctttagatgaggaatacaaaataactataatgactgatccttcaggatcctgaagggcatttgaaaatgctgtgaccatgtggctgaaaggctcttctccatgaacaagggcagcaggatgatgagttagttgatgaggctcatgaatggaagaaaagcgacctaaaaagcatccctgtactggggaaggaaggctgtcaggtttggtagtggcagggagagtgatcctgagcttaacagtgttcaaaaacaggaactgtggatgctaatgtcattgcagtcctaactgtaagctgctaggaaattttggaaattttctgaactgctttcactaatttagaatgacaaaaattgtgacaaggaaagaagagattctttgtgcttgagcttccattttgggcattcaaataaatacatatgaatatataaatatgtatatgctatatacatacatatagacatgtatatatactgtgtgagtgtgctcatgcttgtgcaagtgcatgggtctgatgtgtgcctgcatcagcctatgttgtgtggaggtcataggacaactttgtggagtcagttttctccttccactttaatgtgtattcatgaggacacctcaagtgtctttagctgctgaccaatgtcatcggcccacttatggccttcagttttgttgtcgttctattttgtttgtttgtttttttttgaggcatagtctctatacataacacaagaactcactatgcagaccaagcctcaaactcacagatatctgcctgcctccctctgcctccgtagtgctggtaccaaaggcatgtaccagcacacctgcctctcatggccttcttaattacattcacatgaccaaacagaacaatactttacactgcatcaagggatggggaaagatgatcaagtccttcactgttttttgtttgttttgtcctttgagctatgggggtgaggtatctgacagatatgagcactccattcccatcaagttttatgtctatagctccatacaaaatcttactttgtagcccatgctgctctcagattcctgattccctgcctcccaagagttgggattacaggcatgagctaccattcttagtttaataaagccctttcaaagaggagtttcctgacactcttccccaaacaaagtaagtcctttccagctgctttctttctaaactacaaatggaaaagagagacagaaaaaaaaggcccttgggttgcaaaatggatgccaaacggtaaagatagagaaaagaaatcaaagttggcacctgcatgtttctgactgagaaacatctttccctgtaatctgaagatatttgattttggagcaacaaagttctagagaattccaaatggcatattgagcatgtgtaatgccatattgtcttctgtacctttacagagacatgctgggctgtgttcctttgaatgctcacacatgtggtttttgaatgtgtgattcaaaaggaagaggaaaaagaaacagaagggagaagaccttgaggtaatattatgtatcgtaatgcaaaattgatctctttgtggagtgtgtcttccaggaagctggtgtgctccacagcatcacccaaagcagaagccaaatcacctacacttaatagttgtgcttataacaacaagaagatgaattcagataacaacaagaaaatgaaatgaggaggatatgttatactcctggagagtctgatcaagttcagagcgatgctttccttatttcttaataccttattagggttctcctttaattattaaatatattaatgttttatctgactacatttacaatgagaatcaatatttcccctgaaaacagcaatttgtaagacgcaaatgtcatgaagaaagagaaaatgtggtactcatttcctacccattcagactctccacagcatgagctacttttctgagaaagcatatggatattggatttttttggttcaccatgatcccttgtttaggcaacaataaacatcctactgtaagggcaagtttgattgtttcctttacaacctggattttatctcccttgctgtcatttttgtaccttctctgtcttcttagaatctctccttgccagtgtaactgtttgtgtttgtgtgtatgtcccctgatttttatttctttttccttccttttgtatcactctctctctgaccaactctgaagaaaccttggctttaaaatctgtacctaagtctttctgtgcctttagaggcctcttgtctgcagctgctatacatctatagttttactgtctttctctttggtgagtttcctctgtccctgccaggattgaaagctaacctaccttctatgtaatccttttcttgacacattgtccccactcttttgctcctttcatttatctctcttgtatttttggatgatgctatataatgaggagaaaggcatggctgtccagatcttctctcagggccagccttgtacattgtttaatatggttgaagtgcacaggaaggaatgcctgattaagtggtctctactcaggtacttttacactcataattccactgattgctgctgagatgaaaagaaaggtatgtttctctctgtctatggtttttaacagtggttataaaccaatggtccatgagccagaataataatttctcaggtaactttttggatagaagtacatcgttccctcgatacaccaatctgtgctccctgacattgcacttatatgttagaatgatacaccttaaactttcctatgcatcagaatccctagggatgcttgttaaaaatacaaatgcctggatcctactcaagaatcagacttggggagggggatgctggtatctgtatttctaacaagttccctagggcattcacaatgctcagtcaaagttgaaaatctatcattagggaagaatttctgtgggttaagcattgatctcctcctggacctcatttaaagcaaaaatacttctagaagagaatcatagtaagaaacgaatgtcttggtataaatgactttacgatgagggttcttatcggcatgaaggagagcaataaacatgtttagtatacactgtctacaaggctccatgcttccatagtgcatggttgttaggcaagcccccctttactatggttacatgaactatgttatgataataacaattgggaactctctgctcacatttactcattttttgcaccatgaatactatttctagaataaatactaggtacccaagtaaattcaacatttatatcaacaaaatcctggtaatataagtataccattaactctatccaagacctacttatactaagcattactcattgtttacctaaaattcatatttcacagtgttctatatttttgcatcttaaatctataaatcttattctcaggatgaatgaatgtcttcatagatccattgctccatgttttgcaattttagacctaagagggaattctgagcatgtttttctactttatagactcaaactccctctggtgaattgccccaaagacaagcaatggagaaaactactcaaactatttggctacacctcacccttatgcccttcagttcagtattgttggaagtaagggctgtagttttcttttcatttgcctgaagcctatagcttatttctcaggtggctttgaaattagatgcttgtcacctcacgaaccgcaatggttgccatgcctcctgtgatcctcactgcaactgtgaggtaggtgctgtaattcccatcttaccatcacgagcatggctggatattgaaatagggaccatggggagcaaaagcaagcttctcaacagattgtttagcctggaacatttgaagctgacatctcagtctgtgtttgatttagctattaaaatataccggccttaaacagtgagaagaacctctctccactaatagtgtctttttgcaatttaacaaaaggaaaaaacgaagtgttgtccttttactcactttctatgctttatgagtgcaccaataatgtcatattttaatcaacagcaaggccaatgacaaagataaaaggcagcatgcataaggagaaaaaagttcctcccctcaaacatcaattagaaacatttattagtggtattcagttggcagttcacatttatttccaggaaaatagaaggaaatctcttaaggctagaatggtttaaaggcagcaggtaggatgtagtgcttctgagtaattgctgaagacaagtgacctttggaatctagcatgagtcagttgcaggaagagaaagagaacataggtaaaagacctgttcaaaattcatctttagatttattcaacagtccttcatttttaatgcctgacagaaatattagctttccaaataaagtaacagaaagtaggaataagcagtagtcacttgaaaggtgattgggtgttgactctggaatgtggatttttttgtatttttatataattttctttttattttacataccaactccagttccccctccctccccttctcctgactaccacctcccccctctgcacccccacgtccactcctcagaggaggtaagttcttcaaaggggagtcaacaaagtctggcataccaagttgagacaggaccaagctcgtccccactgtatcaaggctgagcaaggtatcccaccacagggaatgggctccaaaaagccagttcatgcaaccagtataggtcctggtgaaactgccaggcccccctccaacagatcaagccaggtaactgttacccacattcagagagcctagttcagtcccatgcatgttccccagcagtcagtccatagtctctgagcttccactagctgacatgagacagtagaatgtgggtctttataagagtctagacctttgagtgagaaacctactatatgtattcagatgtttctatacatattagctaatcttgacactgtagcttgtgagatatacctcccctcacttatatagtatgaatacagcaaaaacacccaatgtcaggtctacccagctggagtcactaaagcaaggtatctgcagggttggctctgccaggttatttagctagtgctcaccagggcagaaaatatgttaactacactaatagttgtgggctacagttattgcttttatcttagacctattttctttcaggctgggcacgatccttgcatatttgtgtgctgtgttgtttccttactttgcctttcagattggatccctctgctttcaattttctcttgccagggtgaagcccaagattaatgtagctcctcagattttcaaggtttgtcttcagaggtaagtcctgtatacttgtcttccattaccattcaaatccccatcatcttgtagcaactcttggtttcgtacatattgaattatatgacaattcccccatacacaatcatttcctgaagggctctaacaggcccaagaatggcaaacctaagccttagcatggcagacatggtgacagacaggttttgctttttacccttcccctccttgataatccttaggttgcattccaaaagctagccaccaaagtatattcccttatttggccactgacccattcttgagattaatcacagaggtccaactatcaaagcatcaaggtcagtaatcaaaatccatcattttgactaacctaattaaaagaccaatcagaacataccaacacctcctagctcacactaacacagatctccccattgtccctctttaaaatgaacagttgcatagatattttgatgctgtttctgcctgattcaggttcaatcaccttgtctctttgtctggcttaataaaggatgtctttgtatttgatttgtgctcagaaactgactttgggtgtggtctgtgcctaatctggggtcccttcatttcctatttctggcttgttgataaacatcacaaacaacctttgctctttcctcttgcaatgtacagatattattccttaaaatatgaggacttagtatctcaaaggcaaaaatcccattcaccatacctcccttgttctagctagtatcacccccatgcaatgtcaacatttggtttgagggctgatcacatgtctccccacataaagattctcaccaacaaactggacaaccagagctcaatccccaggaccctcatagtggaagaagagaactgcctcccacaagttgttctctgccatctacagtatgctgtggcatgtgcagttacacacagacacacatcacacagtaaatacataataaatggagaagagcattctggtttaaggagatgggttagaccaccaacatgacatgtactcttacagtgagagagcatttttggtattctgtggtttcacatagaaataagaatatctttttggtcgtaggagatttttctgtatttctcaaatgtctcaaatgtctttgatgagttgcttttagccttcccacaggcttggggactataagccatagatttgctttacctttgtatatgtgtcctttgttttgagcatattcagaaatattgtctatatttcttaactagattacaatagccctagagattagtaatgtttataatgatctccagatcttgccctcgtgtgtgtgggggggtggcatttaagctttagcacaaacctaagcatatgaacttcatgttcaggactgtggatttcttatctatcttgtttgctgtaacatagtcagtgtatagcactctggaggctctctaatttgttgaatgaacaggtgaggctaagttctgttgttaatcacatgctttacacatgaaggaaacaaggcctagagatgtgtctaacagcatacaagtagtaacaaaagagtcatggctgagatttttaaaaatactttttatttaatcttgagaatttcatacatgtacatacctacccatcttccttctccaacttgttccaattatccttaaattcatgtccttttttcctatttataatcactaagtccaatcaatactgcccatattctatgggtacagggccatccactagagcatggaaaatctactagtggccacacatgcaaagaaagtgattcttgctgctctagcctctgccaatagctcctcagtaccagataaggtctggagagctgtaacatgaagtttcttggcccagctaggtcccattgccattctctgccccgaggaaacatatggatgctatattaggtataatattattgtgtgctagctaagctttcttatttgctagctcagtcttaattattcacccattttctaataattcatgtatttccacatggccttatattaccagaaataaggtccaggcctcttactctattgggagtcttcatcatgtctgtgcagtgtctcaacagagaagagaggcaagaggaaggaagagagcgatttcctgcttgtcgatgcttatattctgattctgcctgctatgtcacttcctgcctggatcacatggcaacttctatttattacatttcccagaattctccttgactccttgtcccacctgtcttgcttccctattggccaacattgttttattcatcaaccaataagggaaacataatgtacctaagacttcccccatcatctcctcttttctgtctaaataaaaataaggattttaactttaacacagtaaaatatataacaaagcagttattaagcaagaactacatatacaatatttagtccattaacatttagcaagattcaaagaaaatatcatctattctatctttgtgagtctaaagtcctatatgtaacttatcttttatcctaaggaaaactataaccatgactatctgttttcaactccaccaaagaccacaaaaggataatatataaactcttgaattgacagagacattttgctgcctagacagtcatccaaagttcctctgtaatgttggggcatccatcttcagcctctaggccataatgtgtctggcagacttctcagcaaagcaggaaatttgaaactgtcccacctctataggcagttagccagccatttttctctgtgtcctgcagaatgtctggaagactcctccatgaaacagtaacacttcaggaatttccatcttgttttgcaagttcagcagtcactttccggtggatcctgcatgtccagtttatcaaacagtccaggcaagagcagtttcttgcccaaatggctaatcttgccatgctgaaggcaaactccttattgagtttcttcaatgcccatccttctttctgatgtaactggtattgccaggagcagttgtgtctccctgtcataaaaactctaaaccatcttaaatgccatattctgtaggtctttcaaaggtttgaagaatatctacccacctcaaatacatctctttatatctaaaaaaactaactaacctaactctaagttttgactattatatgtgactgtctacaatctgtatttaattacacattacatttttaaaggagctatacaaacacaatacctaaacaagagaagaaacatacatataacaaaattgaccttaagtttgtatcaacaaatgaaaatccattccaatataaagtattcatttctatatcacaatcccttttttcctttaaaaagagatcaactgtgatcattaatcatttataattaaccatatataaatgaaaacaaacatttataaacaatatttgggaatgtggccatcgttctctctggtgatgaaataccatggggatcctaagaaaacccagaaatcctggctgtagtggtctgcaaggctgtcttgtccaagctgttggatcacctgggccactgcttcagggggtcttgcttcatcaaaccatattagtctgaaaggaatccacaacttttcattttctgtagaaacacaaataaaatctcttttccaaagtaacatatccttatacttagatcttgaaatcaaggcgtttttaaaatatataagttggattaatccagcagcatttcttttagcagttgctgctattttctcagcagtcaaacaattcaaagacagcataatagcatacagtatgcagactctctgtgtattttccatctttatatggcttatttatttattatcactctttttcttttcttttctttagggctacacagggtttctcggtgtaactttggctgcccttgaactcactgtgtacaccaggctggccttgaaatcactgagatctgcttgccaccacacccagctactctttctttctttccaattattttatcctatttcttttctttcacaagcctacgtgtatttttaaacacactgtaaaccttttagaggtttttcttcatctgaatctgtctttactttaaatctttatctttttctggccactcagtcttttacctgctaaacaatattgctaaaattaaagccatggctgttttagccactgtctttccaagatggtgggggtatgtttgtcaccaatactgagagctgtgctcaccacgttgatctatgttgtcatcaagcagcatgctgctgcttggagatgtagtcactgccactgccatctgctcttacacacgattcaattgttagcagggcctcttaaaagagccatgcagtttttccatttatgctgagtcaggaaacctcccttaaaggagcctagcaagtctttgcttgtctctagcaaaacatagcccacccaagaaaatgctgttaccaagaagctgtgcttgtctctattcctttgtttctaagatcccctttacagcttttgtcagatttacatggaaattcatgccacacgttgagggcaacattttgtaacgtgaggttttcttggcccggctaggtcccactgccattctctgccccaaggaaacacatggatgctatattagttataatactgttgtgcattagctaaggtttcttatttgctagctcaatcttaattattcacccattttctaataatccatgtatttccatgtggccttatattacctatgaccttctcagcctgggagttttggacaggcacaaaattcagtcttctggagcagtcctcaactccagtcagaactctgttagctgtcatgtaacagatatgacactattacaccaatgggcacatcttgcctggtcagcatgtggggtccagcactgatgccttttctccccacagcagcctgtagagcaccttctgcaactgtgaaaactaatgacaaagatttcttttgttttctttttcaagacaggtttctctgtgtaggcctggctgtcctgtaactcactttgtagaccaggcctcaaactcacagtgatctgcctgtctctgtctccccagggctggtattaaagatgtgccaccaccatgcccagctaatgactgagatttcaattattctcacacttgagtccttagctactatgctctgctctgccccacttcagtaaagtattctcattcagtgtgtactcaccatcttctcaaccatcactagagaatcctgattgagagctccaaaaatatgtctagttgtatgtgatggcttttgccaaattctggcttaaatagcaaagagcctgtctctgataacaaaacaaagcaaaacaaaacaaaacaaaacaaggaaacaaagcatgcttacaaaccctcatgatatcaaagggacaccttcatgaagatgatcatctctttgaggagatatctactaagtagctcttgggttaacgtacttgtatgtagttactctaggtcacagagtccgggagatgacaagtgacaatatgaagcaataaggcatagactgaaggaatgttcttattttagactttaaaataggacttaccagatcacagcacctgggtgtgcctacatttagggacatcaagagacacactcagcttttctgtttagcacatggtatgaagtcaggtactgtgatgaaacatcagatgtgacaggatgccatgcaggttttagtcagagggtgggacagagggtggtataatgtcaagtcaggaaacgtccctaccctttgatcttgagttttacttgcagagctaaggcaacttagagtgaaatcagttctataatatatgagctgtcacaaagactgtctgtgattaacttcccgatgagtacttaagtcaatgaaaggcatggaatgtctatgtgcactgagatggcttccttgccgagatgaatctcaggaagctcttgtaagagctgaagttaacctgtaagacccatgtgcccaagggcagataacttcctggaatgtgaagactgtggttcttgagaaataacaaagccacgtgtttttgctcccctaaacaagtctgtttgcactaaatatgcatgattggatgtgggtatgcttgattagacgtaagagggaagtacataagcaggaaatacatcagggcatatgcttgctcctgatcgcacatacagtagccccatggttttgcctttttaatcctctgcaaaatgtgaattgtggctatttcctgggaacccaggagtggtactggccatagcccatcctccttgccagtatttcattaaagcttgcttcagattcggctcaaagttgtgaaaccagaaaaactggtttttctcttgagctgtcacaaggcggtctgtgattaacttcctgatgttcagtcaacgaaaggcagggaacttccatatgaactgagaatgcttccctgcttagttgatatctcaggaagctctgtcgttgtctcctgataccctgcccattcttgtcaaaacaacattccaatagtgccttttgcaaacaggcttctggtagtcctttactgagaacagcagccttattctggggtgaagcaatgaagtaaccttcagctagtcccttttctggtttttattttctagttaggaaaaggactggcaaaggtacatcttccaaaatttgcatatccaatttgcccattacatattctaatccttagtctcttttctcaaccaattgaaacaaattccaggaattttcatttcaaaaataattaaaatgtgctttgcattttggaatatttatgcatgacatcagcttcaaaataattcaaaagaccttactggatgggatataaatgcacaaggttgacaatggatagttaattatagagacagagtgatcaatatcttggagctctttgcagtattctctcatttgtttatgtttgaattcttttgtaataaaaagtttaataaaactgaaaaccaaaatgtctccaaagtcccccaggtaatttagatgcagctcgtttgcaggctggcattagggagtctttagacaagattatctctaaaagcttttccagataaagcacactgtttctttatgaggaggatgagacttgaataggaccaatcaggacttgccatcttggccagggatatatgttagtttttctctggatgaatttagatgtagccatcaaaggtggaagcagaaacatgaaaaagaaatactgactgttattgtgcatagaactaaaccctagatgcaaagtgctggcaggagaaggtgataaatagaagcctttccaatcaagataaccagtcagcaagcagccaagaggctcctttggaacagctagtaatggcatcattcaaatcaaaacaaagactgatgatgttaataccttgtagctttcttctaagtgcatctatgctgttccatttgaagctcatatcttacccttggggtaaaaggaccaaaactggctaagttgttctaagagagggtggggggcatggcaggttttatcattctcattttacaagtgcggtcatagaggttcaaagaaattcagtcaagatttcttttaagccactttgattttctaggatagaagaaactaccaatatttcaaaagtcctggaacagatttcaccagttctgacacgatgatacactaactttttttttcagggttagaaggttttgagtttcaaaagccagaatcagggcatcaaatttctttgtttaatttaggcaaaatttcctttgtcctgggaaaataactgctagaaaagtggtgtcttatgaattatctcagaaagcaaaagaaaccatgaagttgtttcagaactgctaacagacatacattcaaaattttctgaatatacaaagtctatttaaaccttatttattctaaattatttgagaactgtttctcagttgaagtatcaagaattacctgtggtcttgggcacagatttccagggcttgggatgatggttttcacatgaaggttttcttcaactaatttctaagtgtgccatttttgtcaatcaaatactttaaccatttcacctagacattcccctgcaatttctataatcataagagacctttgtgcacacagtgtactcatagtgttgatacagccaatagcagtaaatctgaagaaataatagctcaactatgttaccatccatgcaaacgaaaacctggtctcaccccttggtgacttggcatgcatggcaggcagtaccctgactctgtatgcaggtgttaaggtacctttaagagacaagccccacccacttctgctctctgctgtttctctgaggaagcagccctctctgtctctgtctctatctctgcgtctctctctttctcttctcacttcctttcccttactcccttaccttcctccaataaactttccacataaggtctacctgatggtatatttgtttctcacctgccatgggattcaccaaaggtcctacccatgcagtgttcataacaaactatgaatgatatttttaaaattagttgatgagtaaagcttttgtgataggaaataaagttcaccatgcaaacatgatcaaactgggaatgaggagacctcagctcttagttcatcctttatttggtctatattcaagactagacttcaggcaaaattaaaaagttgatccatgtcttaattagactagtggtaagcttatatcttggttaatgagagtttatcattaaaaaatcagactatccaaatgtaaaacggaacttgcccattgctcaatgtgcaacagtaagctatcctatgtctttatcctgttctgcactgctataatgttattgaatattctgtctttgattaatgtgttggtgtttttaaatctgaagaaattcactaagaatgactatctgattagatagaattggtgtgtgtgagggggggagggagagagagagaatgtggaagttagttagatgactttaacgatgtatttccaggcatcatgcacattttttttttgatgggaagactttcagtggcctggaactcaccgagcaggctaagctccttagagaacaagttccaggcatcagtctgttcctgctttaccagcactgaggttataggcctgtgtgcctccaagctgtagggatcaaactcaggtcttcgtgcttataaaatgaacattttactgatttgagcaatctcccaagcctccactagatagaattattctaccagagcacttcataagccagtggtcagtttgtaaaatttgccttttgatccagtgtttatccaccattaactctggcagggtacctggcctaggtaataactcattaactgactttgctgattatctcattttagaagctatttatgcatacgtcatagttagcttcagcaatcagtcaatttgacacaaacctagagtcacctgaggagggagaaacaactgaacaattgtccagattacattgacctgttgctatgtctggaggcattttcttaatttctaattaatcttggagggtacaggctactgtgggttgtgctatccttagaccagtagtcctaaggtagctaagcaagccagaggtgctaagccaataatctgcactcttctagggttttgcttcagttcccatctctaggttcctgctttggcttccctcgatgatagattgcaagggaaaataaaccctttcctctcctaagttgtgtttggtcagagtgttttatcacagcagcagcaaacaagctagagcagcatatttcaatggagtttaaagaaaagatatagacaacaaagaattgtatctcgtgaatactttccaaacattttctaaatgaacttctagcaaacaggaccattgctttatattacaggtgaagcttaaaattatgtgtaaagcaaagcctgaatataaacaaagcaagacattttcattaagcttcttaatggtacagaccaggaggaatatgaccaagtgagcagagggtagggttgagattatttacaaagcatggcactttgacaggatatttcctttttcacatttttatattaaccccgattttgttagatgtttattccatttgccacctagacttgaaaaaggaaaaaatcagtgtgcacacaaaagcatgcccatttaaagaaccattatattaaaaggcttcatcaatcctaaagaatatcacctaggtcactcagatccatagatcctgctaacatcatctctgatatcaaagaatgtcactaatttcatgttgtagaggacagttgaaacagtcacaaatggaggtggggaggaatccaagtattagaatatttgcacaaaagaagtaatactgaaagcaatcacctttgattttcctatggcattcatttcctcagtatggtcacatggctagcatgtgatattaaaatgtttggacctagaaagttatttgagttgtcagcagtttagtagttaaggtttgcactgacaggagcattaccatgttatgctgtcatccacccagagtcacaggattgatgtagagattacctgtgtcgaagcctaagcaacctgttgttgtctccatctgagacattgaaaatcatcccccaggtcaagtgtcttgaatattttcatatctattatttagtggtgactggcaaactcagagacagggaattaatctattttaccttctggacatctatgtgcttgatctgaagttttcctggatattttggtggatctgctttacaatggtaactcagtccttatacagaattatgaagagcatctggtaccaagaaccagcacactggagttaaagagatggcctggcagtgaaaagcacttgcttcttttgcagatgacttgggttctgctccctttacctatatgctggctcacaaacacctgtaactccagcttcaggtcatcttgcacacttttcttgactccttgggctctgtatacatatggtacacatatccattcaggcaaaacaatcatacacataaaacaaatcatttttgttttttaagacagagtttctctgtgtagccctggctgtcctagaactctggagaccaggcttgcctaaaactcagagatgcacttgcctctgcctccccagtgctggggttaaaggcttgggaaagaacacagcatgtcacaccacactgacagcttatcaccaactacttttttgttatcacgtcttaattttacaacaaaggctgtaattacacacaataagaaaaagtggggtggataacttaaagtaaaattgttacatgtttaactgtggagacacttaatgttagcaaggtttgacaatattgcactgtaactcaaatgacttgaacaagaataccattattaccatctggtgtctgggtagcttctaggaaaatgctaattacctggtgtaaaacctaacagccagcatcatcatgttgtgcttattttatccccatcctgtagctgacagaactagcctaatgcctaaacaatattaaatattatatatttgatgtatcaaatattatttccttgaccagggtcttccttctagggatgttaatgcccatgctacaaacactcccatagggagttgggatgatattttctctggagaaaggtagaagaaaatttgaatcagtgtggtgtgtcctaagaaagagccaagcattcagtttgagcatttactgaacaagaatttattaagcattttctgtctactggccaatatgctaaatgctgatcacagagtgaacataagtaagtatggtttagattttcagggagcttcccgtcttgaagaaaaacagacttcacccaaacaataacataataataattagctaatcataaactgccagaaatatgctgaaggaaggaaccgtgattctctgagcaaaggaagctgatgtagagtaagatgtcagggaacgtctctgtgaagagacagttgagagaagatccaagtgatgtgtaaagaaaggttgccttagagtgtgaatgtacatgtggaatgaaaaagtataatgactctgggtatgaatcatccaacaaatggctcatgtgttcaatattggctctagcttgactgtagacagatacctctgaaatagtgaagccaaataaatctttcttccttctaagttgttctcttggatatttgtcataacaacaacaacaacaacaacaacaacaacaaaacctaacacaaaaaagaatgttgagaagaatatttgtatttgatgaaaaggtaaacacacagactctttgacaggaggaatggcattcaaattgtggaactaaaataaaacattagagtgataaagatgagactgaaaaatagacaaggctagtttctgataagccttctagactgtcatacagtatttggttgtttaaaaatcatgagacaataaaagcattgaaagattttgttcagtgacttagcagagtttttaaattttgtttttattttatgtgtatgtatgttctgtctgcatgttgtttgtatagccaccaccatgtgcctgtgtgttgccctgagagaccagaagagggaattgtatctcctggaactggagtaacaggcagttctgagctgccacgtgggtgnnnnnnnnnnnnnnnnnnnnnnnnnnnnnnnnnnnnnnnnnnnnnnnnnnnnnnnnnnnnnnnnnnnnnnnnnnnnnnnntggttctctgcaagaacagcaagtgttcttaatcacttaggtacctctccagggcagatttttatttttaaaagccacatatgtgtctatgaggaaaggggataactgagctccaagagtgtaattgaggagactagatagggggatatagaaatgattcaagtaaaagaaaatggtagctgaggtcctgatttgactaatcaaggaactttcagtcaatgaataaatcagcaaggaattacttggcacctatctcaaaatgcatggcttgctctactcattatcttgaagggagattcatcttcagcctcccacctttcttttggacagccttactgctccccaattatcaagcatcccaatataatggggatgcctttattaaaaatgttagcatttaaggaaataaggagaaagaattgactcaaagaattctaaatagctttttttaatagaagagtattcatcaatctatgatccaaaaaaaaggttaccattctgagagcccataggaatttaatggtgtaagaggccttatttttaaaaaatcaaatttctaggcctatcttaaatcagaatccaaatctgaaatcttgattagaatttggagcagagctcagtcaatggtaggcttaatcatctccttaggtgattctgctgaacattaacaactgaggaacaatgcttatgaggctaatttagagattggtgtttttatttactttttttgtttgtattttttttagaaacaagaaaatgaatgtaagaagaatggagagagaattccaggttgagagtggtcctgagaaaatgccaagaaagaagaattagccaatttatgctaaggaacaaggaagtggactgatttgtcgagtgggttgtggttggtcagaagtaatgtgaagtcacctctagaaggagaagacaaaagagaagctatagcatgctcagagagtggtcctgttatgcctagcctacatgaactaaagcagtttctatcatccctgaatcatgggggaggggatgtgaactacatttggattttccttctctcattcaatgactagaacatagcacacttagtcaactctatgagcatggacgcttgtctcccctttcctaaactcctgtgttgaaattctcatctttaaagtgatgattttaggaggttggaccttttggatttgattaggtcctgtgaggaaagcccttgtgatgcaggttagcctttctaaaaggaacacagcttgctcacctctgttaccatgtgaggaaatagcaagaaggcattctctatgaatcaagaaacagcctttcaccagacaatctgccagcagctttatattgaactgcttaacctttagaaccatgaataacaaatttcagttgtttataagccatcaagtgtatggtattttgcaatagaaacctgaatggactgagaaagtacagtaacaacagtcaactgtaatgagcttgtactatgtgccaagcactttgcaaaaatattttacatgcaaatccttacatcactgagaggcaagtgttatatattaattctttgtcaacaaagaaactctggaatagagaggctagaatatgtgactcagggtaacttagttttgaagtggccacgccagaattttaacaaaagtctgtctctagagatggcatgtttagttacagtgcaaagtcattcatatcaatgcatgcccacgagaattgacagactttagggaagcacacatacattcacttagagggagttgttatgtatgatggaggctaagtcctgtggattcaaaggcaatttaggtcctaataaggcttggcacagtcctgggtaaatatacaacctcaaacagagattcatcttccctggtgggttaaaaatggccaaagatggtaagcgggagatgttgagagcaatcatttgggagtctgtcagcaagtttgttggtgctaacacacacacacacacacacacacacacacacacacacacacacacacactcacacacacacactcacacacacacacacacacacacggagttttaatttcctgggattttgttataattgttttgtaatttatttgattttagtgctgaggcacaatctggaggccttatatgtgatatgccagctctggtccactgagcaacatcccggccctagtaatacgtctcttgatattttaaataagttttgacatattgaaaataaaaataagccgaggaggaggaagaagaagaggagaacagacagattaacatcataaaactaaacaaagccatttagttctctactgcagatagtttccaatgcaaggggtataatacaagataaacaatcaaccttatgaaggtaattttaaatttagatgtaaactgtaggctgtctagtggaactgatctgagctttattttgacctggcagcttcttctaagttactgaatcaacccacttgaggattgtcatgacagcagattagagtgtgaaaccagtccttttcagtagccgtagattcatagaagtcatgcattcagttctgagcaattactgtcagtttagacattcaggttgaaagaaggaagtgtataattaatcaagcagagacgtatagagccaaagaaggaaagattccatggtataatagaattgggggtggggagagaagggggctctagtcactttttcttaacactcttcatagttgggtgttaaagaattcaagaacttctaatttggacttttgctaaacaaagaggaaattatgcagaagcactgaagatgtcctcttctgacactacttaatcattcatgtgttcaacaagggtcacatcaggaactcttcgtggcacttgtggatgtggagattaatcaggtcgaagccctggcctcacagaagggcatagtgtagtgggatagatgaggaaacaacagtaaaagaaacttggtaagtaatataggaacagatttttatcccgaagggtctacatgtttgagaatgaggggaggaaagaaatcattcagaaaagcctataaatatgacatcacctcatgcaacagggaagagataagcatagagctttcttttttacagtagcgattttattttatgtgtttgcatgtctgttacatgtgtgtgccctgtcaacacaagaaaccacagagatcacaaaatggtgttatgcccgcatggaacaggagtttcccaggtgatttccaccattttcccaggtgattgccagctgccatatggttgctgggaaccaaacttatgtcttctgcaagagcagtaaccagtcttaagtgctgaaccatctctccagctcatgcactgatttcctctgatagaaaaatgttgacttctctgaggggtaagatgatacctattaaaacagggagtctgcattctgaatcgagtacgtgtgtgaataccagtgtccctttagaaggaacaaggagggggaaaggatggaaaaacaatcaaatgctcatgggaaaggagcatgggtttagaaagtctagaaatgcttttgaattgacatatgaagaagacctgtgagaacttgagagttgttacaattctatatggagttacgtggtaggagacatgaagaaaatcatcagtaaggttacagacctttggtaagaagtcaggcttcgggaaatgcagagcgactggggcatcaggaggccgctgctctccctgttcctcgctgccaccaaagtatacactgtgtctctatgctgaggagtaaaagaacaaagaatgccaactgccccgaatgccatctacagtcactgcagtattgaaagctgctgtccttgaggcatttgaaatgtagtaaaaagaaacagggcacgggagccggaaggctggcctttcaaatgctgtccattcataaagcaggcatgataacctctgtagacctcccagacttcttgtgaggctcagacaagatgctagatagaaaagcattttgtgaacacttagagcatatatgctgggatgtggactccctctgtcctacaaaccccctatggtaatcaaaagtcctcaaggataaatgaaataatcaatggaaaacactgagccgctctgaaggaatttagtgtatggaaataataataaatgtgattcacatctgctttttgctgataacgcctccctttaaagtctggacactaaaagagcatgacacatcatgccctctgctgtttgttgaaagccctctactgctgaaagaggactgcaccaccatgtttttgccaccaagtacttcgttttcaattcaaaattaatgttgtttctccttctcctcctcttctttaagttttctattcttcatgaccaaatctggagacagatatttacataaatgccatatgaatataatcatggttgtctttccatctcctgaggccatatagcaggcaataattgatcacgataaacaacaggtcacatctggccagagcccttcagaacacattgacattgaaattccgtatggagcagagcaccaaagatgaagtgcatagtttttctgaaggtgaaataatgggatgataactgtcagccacatatcttagcgagggctggattcttttaagagcaattccatgcttctgacggaaagcactgcactgtgactggcagccctatctatctatctatctatctatctatctatctatctatctatctatctatctatctatctatctatctaatgtattacttttaattactcatatttacatatccatcaccccattcccttaccctcccctcctcccatgttccccaaccaacccaccccaacccagtcctcgacttctctccagggacagagaggccccctaccaaggacattcaaagtctgtcatattgtttgggagagggtctagaccctccttgctgtatctgggctgcaatagtatccctccatagggaatgggctcccaaagtccatttgtgctctagggaaaaagactgttttgggctcctagctggtagccacattcagagggtttggtttggtccaatactatttccccagctttatgactagggtctccattctatctgtaggtcaggtccactgtttctgcaggtctctccattccagtcttggctcctttgctcaaacttcctccctctccacaactgaatttcagtagtatggttcagtgcttagctatgggtgtctgtttctgctttgaacagcaactggatgaagactctccttcctctccctgcccccggggctccaatttggtcaggggttcttttccccattcccttctttgagggactatgcaatcttctcttggggtcctccttgtttcctagctcctctggcagtgtggaatgtagggcagtgctatttgttgtccaatgactcaaccatgggttaccctcaatgtaaaacaagatgtgattcttcaaggagatgaaggacagttagcataaaggcaggtgggattgttcaggggtccagaatcaagaataattagtccctatcaccataaacatgtttttcctactctagaggctttctggtgaaacatggaggcaaggccccaagaaatctgtgtttgtgtgtatatgttctggtgcatgagtacatgtgtgtggaggttagaggtcagtttcttctgtcacttctctggtaccatctgcctttgttttatgagacaatgtctcttgacctgaatcttgctaattaggttaggattgctgtccagcaagcctaggggatctctgtttgtctctgcttccccaacactgttattacaacttttgtgttccaccatatctagcttggtactgggactcttacagtccacatgcttgtacaacaaaacactttaccagctaaagtatttccccacctcccaaagcagaggcatctttggaaatagcagccagaaagactgtctagaaccatgacctggaagtaggtgtggttgacttcttaaattgcaactaccctgcttctattttcagtcctgttctgcctgtctgagtcttcttccctgatgctgagtgccttctccaattagattctggtctggacaatttattagagctaaggaattaataggtgctaatggctctgcttgtaaaatgggctttctatcttcaagcaatggcaattagatgctgaaggtggagctaccttctggatctcacctcatctgtcatatggatagtatggtgacaggatggtactagaagacagaatttcactgtgattcaaagctgtgatatacgacacagtgataattttttttcttacctccgaccgggagaatgcagagagttagacagtacaattcaatatatcaggattaaaacaattgttgtgaattaacttaatcattgctttatatgccttcagagacaggtttttgtttttttttttaattctattgtcaccaacaaataaatgaaggtgggtaaatacagataaacttaatttttagaggattatctattctcaaaggtaccaaatctttaaattaaaagtgcccccactacataaaatcaaatacatgtattgcagtaatgtaagacacaaggagagcttgcctgaagtacaggaaggctaatgtgttgttattgtcattttgcccatgtatttcatattcaaaaaacagcaagatctctcagcatggcctcaccaactggagttacctgaggccgaagaacagggaacaactaaaaaattattttcttttattcgagccatggattttagacttctacgtccagagtgttacaccaagaaatcagtgagaagacaagatataagattgcaaagcaagcttcggtgtgcactcaaatcatgtgagtgttttttttttttttttgcttttttgaatatatgtttggaatattttatttacttagggtttttatgtctttgggtgttttgtctgtgtgtatgtagtgcccacaaaggccaagagcagctggttcccttaatccctctttctgccatctctctagcctaggggaatcattggcatcttctcctcctcctcctccttcgagaattctttacatacatattgcatttacatcatttattttccctccctttctctcccctctagctccttaggtatcttcaattccctctaaaatacctgagtaccttctaaattgcagattctggtgcgttccttggggatgatgcctgaaatatttcatttcaaaggaattcctaggtgctactactgttgctggatcagggagcatgccttgagtagcaaggactgttctagacagagtctattttaattttataaatttaggtgggtttaatttactttgtgtgcatgagtgtttgccttcatctctgtgaaccacttacatgcctggtgtcatggaagctagaagagagtgtctaatcacctggaactagagttacagagagttgtaagctgctatgtggaatctgtaaattcaattggggtcctgtgcaagagcagtgagcatgagtactcttaactgatgactcatgtctcagcccattgactcagagtttagaaagagagatgttgttggctagcaacaagaaatgttgaagaggctcagtaggaaagttgcacagtgttttctggaccaaataagaacaaaggaaaccaaaaggagacaaagataaggctattggtgctcatgattcagttcaaatatactagattgcaagtgacatgcaccagaaagagagcatcttttgcaagcttaggaagaaaataatggcttctggttaggatatgcatcctggaaaccatgctgcatgagttcaaatttcacctccaccacttcctaataacaccttgatcttgccttatcccctgaacctcagatgattcatctgtaaaatatgcataatagagcctagctgaggatgattgtaaggatgaaatgaaatgaagagtggaaagccttagaatagcccggccacatagagctcactaagtggtagctattgtaacacttccatctttgagttgatactgtttaagtactactgtgctttattgaagtgctagccagccatggtagtgctacactggtgtttgatctgaatctcaaagcagcctccattgtttgagacacatggaaagtcagtgtttggggatttaaataaatggaattctagacaaacgtattaaaaggggaagaaaagcttgcccccagaaactatacttgttttgtgctttgaccccatcactccctctgcctatagctcctctgacttgaatgaggaacaaatgattaaaaaatgaaactggattagagaaatcaactgctttctatctctgccaaaaggaaatgtcgaatctgggcaattatcattcagcctggggcatgccaggctcaggggaagagagaaggggagaagaaggcttagcgaaagatatttactagctcatgaagaatgtcctgtgcattactgagttgcatgcactgtcctccggtaagtaaaagcactcaataatacctcagtttcagggatctacagtctagaagagaaacattagagtaagacagacagtcagacacacacacacacacacacacacacacacacacaattatacacagtagcctgtaacaattctccagcgaaacctgttggttaaaacagtggatgtgtttcttgggagtagcaattattctggaaagaaaagttggtcttgactctaaaggtccttgaatgtgaaatgtgtgctgtgggcaattagaagttaatgatgtttgtgtgtgagtgggggtaccatatgcaaaagagaatttcaggaagattaatctggcaacagtttgagcaatttaatttaacaaccgtttactgagtattatgtatagcaccagagtccaagatatagagttctgcaaggatacagaaaaatagagggcacacatacataacctctctgaactgaaatccttctcagggagacagacataaatacaatgatctgaagcatgtaagaaaaagagaaaattcttgtgttccaggggaagtgatctctagggtagactgaaatgtacatttatggaataagagtgtgggggaaagtatatgttacacatttatgtaaaatttatctgcaaagttgcacaaaaatccaagtaacataaatcacctctaaggaagagcattgggaagtctgtggtagggggaataggagtgttgtgtgtattgccattggtaccctctttgagtttgaatctaaacaatacattattttactccaaacacttagaaattggagggggctgagagtatagctcagttggtacttatttcacaagcatgatgctctggattcaattcctagcacccatatgcaatggatattagagccatgaagggggaaatgatgaattctcattgagcaaatatggaaaggttctttggaacatgtgcatatgaagttaaatctctaagtgctgatatttccacaaacaatgatctgagtggaagtcatattaaacagtagacagagcttacctgaagccctaggggaggagctagacatctgccatccatcatcgtatgtcagctgcattcagttattgagcaagggaaatatggacagtgtatgtgtgtattgaaatttgcataattcatttctgtgcattatatttaacattgtagcatgtaaagcaaaaatactggtggccaattttggaatctctttttcattgatgtctctaaaaatccatattttatacttaaaacaaaggctgataagtttaccacttcattacatggactttatttcctcaatattaactttctacagtttctcacttttcatctggttctcttctactcatcctttaggtattccattaaacattacttcttcagacaggcctttcagaggtgcagatgtaatttggttggcagagtatttgcctaacatgcctaacctcagtgtttgaaccctcaggacaacagacacaaagtagcctctcatgagcacagtctagccaataccccttctcatcacacttatacaaacacttattcttttctccccaaggtgtgcacactctctccagacacttaaagtgattatagtaatataatgatttgtttaacattggcatgttgtatttgactcatgaagacatagaatatgcctccatttgctcagtgttatgcagtatttagtatgaaatctggagtagagtagacgtttagtgaatacatgtggactgaaaactggggagatacttagcctattgttaatgtgtcatggtacaagtctgaaatgtcccttacatgctcatgttgtgagagccttttttcccagctggtttgatggtgccattaggtcactagaggcaggctcttgaaagttttagcccaatcttaggttctggtcccactgtctctaatctggcctacagtgtgagaatgcctctatcacacacttccatttcgagaaattctctaccatggaaggcaacatctgaaattgtaagcccaaatgaatccttcctgctttaggtcatttctggatagtatgctatcacagagacattaaaagaacctagtataacatggtttgtgtgttatactaggttcaaacccagaacaaaggaaattatagcaattatgggcaagaagaaccctaaagtactttctgggtccaagaatgacccatgctttcctttcagaattctctttcaaggaatctatgaaagcagtagcagttctctaaaaccttaagaagaggtcaattttccaaagtacttttgtggcctgtcaggtatacatcctgtctgattccatggaagcctgcaaattgtgttactatgactcccctgagagaatagaacctgttgccttggaatgcttagtgacatagccattttctgagttactgatatttgggcatgaaaaggaaaaggatattgtgaggttcaggatggtccaaaccaggaaaatcaggtcaacttcacatcatttttatacacacattacctcacttaagatgtttctggaccgtattacaccaagctagcaataaagaatcccaaggctttccaaaaatggccagtttctcctcaacagggtcacacatacatccatatgcttaggtagatagaggagggtcgcaaggaaataattcttcttcaaataatgaaatctcttgtgtgcagaagctcacgagatgtcacaacttaaactgatatatacagtgagtcctgatggaaagtatcagtgaatagtgtcaatgactagtgaggtcgtttcctttctggaagtgctcattaatactgtgactctaatgctcctgccttgtgtgactttggaagccatagccaggctaggtttcactggcagtgagggatagagaaaacttacggggatatagtgtacttttaagaagtaaaataaatgtaataaaaagcaggcagcataattgtcatgacttataccccatgacatttgataataacaaggttggtacattgcaaataagttccacatttacaactctgccttggtatttacacttattaaattgtttagggaggtggttcctggatgctggaggcccatatataagacatattagcataattggagtacagccaaatccctcagtgtacattgcagacacttgttaaaagcttgaccttggaggaaacaacttcctacttgtcttcaatcagttagcaactgttgaagtcctctaaagtcaacgtgcagacatccagtttggggaggttgtcctcaacacagaccttacacaggtcctctgttcccaacacagtgatgaaggttatgttctcacctggctgaggaaattagctgcaattttctattacctggaccaaacattgcttttcatttgtttaattccctgagagttgacactacacattcattcattgagcaattgctttgtgtaaaggcccagagatgaatgagacagtcattgccatcaaggaacttacacttcagtcaaggacacagaaagccaagtatagtaggaggcagaatttaaaagaccataatagaggtgtgaacaaattgctgtgggagcattagataatgccatttattttaatggtgaaaggaaaattaggaaaggcttcaaaaggcagcattggcccttgaaggattaataggagaaaaatggtgaggttaggtagtgaggcaatactagtctgaataagctgcaggtctacattctgcatgagagtaacatgcatatctgagaatggtaatgtattcttgcattttcctggcatcctcccatagtaaatctgatgcagccttgttgtaaggatggagcctaatacttggaatccacatctgagtatgctcttgagaccttgaaggtcacactacttttcttaatagaaacactcaaatgttttcaaacagaaccaagactaggcaattgaggatgctatctctggtggtgtgaaggcgaatgaaacacagaggccaagctccatgcctggaagataccaggctgggagggaggacaacacaagatacactaggaatttctcatcctaaatttagaaagagaatgtctggctgggaaagaggtttcctgtggaaaaacatatttgcgggtatgttttagtgtatagtctccacttttcattcagtaaggaggtggtagtggggttctggaaagagttcacagcatcatctgcttgaaagtcatggacatgactaagacgaccctgggagtgaagagaacacaaatgaagaaaatttgggttaatacctatattcatggcccatgtgatagcaaccaccaataaaggggactaaagaatttttgcagtaataaggggagcctgggctaggtatgtgtgtgggagatcggaaataataagcagaatgaactttcagaggcatttataagctcatggtgtcctcaagtagccttgaagagattcacaagaaggttgctctttaataggatcctggaaactcaagacatttgaagactgagaagaaatgagatggtggaataatggatgtgaaaaatgaaagtcctttcaaaagtacaaaatgctgtacaatataaggtcacagcaagtcagctttttaccacagatgctgagaagtcaaaaagtcgctgacatctgtaagacactttcattttcatcactatactgaattctactaggggcacttagtacatgacctcttttatttcctctcttcattccctaaggaccaccagttgttcagccaggtaaaatacttcattacttgatttttgtcaaaaacttcaggctactgtgccaaggattcccaaagactattgaatgagaacttaccatctttaaatattttcaatttaagtttgtgatatttgtgatttagtaagaaaatgaaggggagtaacatgaaattttggagggaaaaaggtagagaagattgaaaaactacaatagttttagcttaaataaagctacgcagtgttatgtgactggggatataagcctcatagttcttaagagaaaaggctttaagcataaaaacacattggaagtctgaaattcttatgaaataccgaaacaggaagttttgctgtttgtttactactacttcatttttcttttcttttcacttttctttttttagacagggccttgtcttgcagcacagactgatcttgaacttggggtgatccacatgccttaatacccaaagagctgagattacagtcatgaagcattctggctgcctgctgctcctggagagagtagtaattgcttaagaagctcttaaatgtacagtttgaaatattaagcagacacttaagaagctctaactctgaactaattaaagtctttcccataaattatacttcatctaaatgcctttctttcctgttgctgtgagaccaaaagtaaaaaagcaggacatcttaatgtcatctcagtctttgctgggttcttacttctcttaagaactgttccatggtttggctttcagtattactaaaaagtgggcgaaaaaaaggtggccaagaaaaggaagtaacctgaagaagctagctttctttattactgtaaacaccagattactgtgtaagttgtgtggaaatcctgtccttttgtttgctttctctctccatgaactcatgatatatacacgaacccagtttgcatgagtgggctttgagagctcttatatgctcaaggcatgcccagggtgatcgttcacatcctgctgcctgtggatcaagatgtagaactctcagtaacatctgcctgcatgctgccatgcttcttgccatgaagataatggactaaacctctgaaagtaagccagccccaatgaaatgttttcctttacaaaagttgctgtagtcatggtatgtcttcacagcaatagaaagcccaactaatacaatatgtataccatcatctttggagaccaggcgatgtcagatttggaagaggtggagttacaggcagttgggaatctcccaatatatgtgttgggaaatgaactagggttctctgtaaaaacagtatgcactcttaactgttgagccatttctctagcacactccacataatttctttgtatataacgtttcggcatttccttataacttatagacttaaaccaaattaaagcaaagatcaagtactgacatattttacctggctgaacaactgggaaatgagggaaaatgaaagaggtcatgtactaaatgcccctagtagaattcagtacagtgatgaaaatgaaactgtcttacagatgtcagtgactttttgacttctcagcatgggtgtcttagatactctcctattgctgtgataaaacgctatgaccaaggaaacttatagaagaggttattttgtacttacggttccagacggttaggttctatgatggcagagtagagggagcatgtgacaagcagcaggagcaacagctgagagctttattatttttattcaaattttcatttattttacataacaatcaatttcacctccttcctctcttcctgttacctcccccgtgtcatgtctatctcccccctccatctactgctcctttgttctgaaaggggcaggcctccttgaatcacaaacaggaagcaaagcatgcattagggcttgtaggaggcgtttgaaacctcaaactcatcttcagtgacaaccattttccaacaaagccattcctccttatacttaccaaacagttccacaactggggaccaagtattgaaatgccaagactactggagggcatctcattcaaatcatcacaatgggtctttaattctagtcatattgaattctttaatattatccacatatgtacaaaaggtttcacatttgtaccattagccatgccttcgctttccctgctcaaaaagaattaagtgtcatgagaacagaggccatatagaccttacttgattcattgatatattcttagagattagccttatatgtggcaggcagtaggtattcaacttatattaagtaagtgtagaaagtcatcatacagctatatctagttaccttttaaattttagtttaaaattctatgtctttaaaatctttacattggtgcttgttttccactttactcttctaacagttaagaagtgatttttatttttttttttagtattttcacgggtcttctttatgccatggttaggacactgatcagtattttccagtttaaattacaattctttttctttttttgagacagggtttctctggattgctttggagcctgtcctggaactcactctgtagaccaggccggccttgaactcacagagatccacctgcctctgcctcccgagtgctgggattaaaggcgtgtaccaccaccgcctagctcttttcttttttcaagacttatttattttatcttacgtgtgtgccctcagaggccagaagagtgtgtcagattctgtagaacttgagttaaatatggttgtgagctaccatgtagtgctgagaaataaacccaatcctttacaaaagcaataattgctctaaactgctgatccattgctcctgttgctccaattatgtttctgatttctgtccccactaagactgagatcacgatggtatgagctgtattcaatttataactttgtcctcaaaaagtgacttccctgaatgggtacatactaactagaacagccacaccaggggcgctgaggaagctttagcaaaatgcaaactttgaggggtcaagccattcatttaaggattattatatctaataagttagtagcttgtatgctgtgcacataaacatcaaaaagtagaattattggctggacctcaatttaccaagataaagtaaaaatatcggtatctctattagtccagatataaggtcatcatgactatagactacacactggctaatctccaagaagtgggtacaaagttattgtttgtataatgtatgtatttgcaatttttctgcaatggacactaactataattatattttacttgtggctattgggatgctaaacatctaaatcaattctctgtgtaaatgggatctttggctatagcattcttttgttataaatcaaaactatatagcatattatgtgtggtatattcatcaatttccacctttctatttgtctttcaactcttggccttaagctcaaatacccccgttgtggatactctgggtttttgactccttatttgggtcatgggggagaaagataatgtatttgatttctggaacaaactatcccaaaggacacaatggtaggccaagattgggattgtatcattaacagatctgcataattactttgtccagtattttatattgacataccacccacaaggagggatcctttggaaagctctccagagaataaaaccctgccattcttcattacttgtcctggacatttacccctctggacatctgaagcccttttgctttagcattacacacaatgcacaaatatctctgcaaaaaacagtttgtgtggagcatggctttttagttgtataaacatttctctactattctgatgagcagaatgcatgaatgctaaggaaaaccttagagttctcgtaactatgcaagtctttgaagacagttcatgaaatctacttgacctgacccttgcaaaaacactcttgaagctctgtttagctaaagcttttcctacaatgtcctcacatcctcttgacacttcaccatccatgtcttttcattcatatttagtctgaatcatagacagtacaacatttaacgtaaatccaagctttattgaattagtaggcattatacagagactgcaagtcattattggtccagcacagatacaggtgtttattccgaggtgaaatgagaggacaaattgacagttcttctattacttgaactatttctttaaggtggcttgttatggacactatctccctcaatacccattcaacacagtctttgctttcaactttcccttcagcagagggatttccaatgtctaaaggaagcttgtaaagaacccttctgtaccagaggtagttttgtgcctgcattatgcatcacagaagacatctaaacaaagactccataaaaagggcagaagagagagatatactagagcagagttgagatccgtgaattctttcagctaattggctacagtggcaaaagtatcaaccaaaatttagaatagccttttgtatatttaataacaaagcatgcagtagcctatgcagacagtagcttttaataacaaccttaaatctggcttgagcaccaaggatgcatttttaaaagtataaagtatatttatttgcaatgactactgtagtggttgaattaggccccaggacccccccaaaagacatgttccttcatgtgctaatcaccagaatttgagatattgtcatattggttaagcagctatggacaggtgttaaatttaggctgtgaaaatgaggctgttgtcatagataatctggatgctttatcaaaacaatccttaaaatagagaggcagaggtagattgtatatacagagggggagatgtcaaaaagacagagcaaagtgggatgaagccacaatccaaggaataataaaaatcacaagaaaagtggcaaagaatggattttctactagagcctgcagaggagtgctgtcctgccaataacttggttttggatttgtggccttaaaaagattacagaaccagaaatctactcttttatcccactgtgtttgtgggaatctgttacagtaaccataggactctaaaaggaattttagtatgagatggggtattgctatgacaaatacctatagatggaaaagtggctttggaattggatgctgggtggaagttagaacaatttttgatgacgaacttaatagagaaactacagattgcctgagccactgatgggaatgtggatgataaaggcatttctggtgaggacacaaaaggaaatgaatattttattggggaccagaagaaaggcagttgttgttatatagcagcaaaacagaagacaaacatgtgaattgtcgctgatagttttgtggaaagccaatcttgatcttgtaagtgatcaagttgggtatttagctgaggagcttggtaagcaaagtggtgtaggtatgagctaattcattcttgctgggggcgggacagaatgcttaagagagtgaggaggaaaaaaagaggataatatatgagacatgaaagtaaaatggaagttaccgatggagctgtaccaggggtagtggtggaagtgagggcaggaggatagaaggtagggagaagggtcaacagaaaaagaaaatatgcatgaaaatatcatagtgaaactcattactttttgtcctactttaaaagagagctaaagagaaggaaatgaaaatgttaaggaaagaaaaagaagaggcaaattgaagaaagaattgttacgtcaataaggaaacagcacttgatttggtaaattctgttactcttaatgatggtaaaatgaaggaattctgtgtgaagacgttctgtggagtgaaggtgaaggatgtggcctaccagcttttaaaggatgccactgaatggatcaggcatacattcctggattcattcaactatctcagagaaagccacacacagagctgaccaggactattgtaagtcacgtaagttaattatgtgtcctctgaagggttttctaatgtttgtgaaaagcatgtggaatgcatttaaatacaaatatataatttatcaataatagtacttcattcattcttgtttacaaactagaaaataaggcaagttcacatctggaaaaggtgatacacgtaagtatttcaaccttaaccagttagataatatagcagggcaaatgccccaaatttcagtcaaagtttacatttcaacatcaattttctacagcctgaaaagctaaaaaaaaaacccacaaaatctcaaagaagccatatcacaatatttcagaaaatactttgtaaagtcaaaaacgcctatggtcgttatttacattaattggtagaacctaaattttgtggttattgtttttaaaaagtgtgtgaaagtggtatattcttaagagtgtatgtgtgtgtgtgtttatgtgtgtagtttcatttaagaaaaaatggaaaaagactcagacattgttaccttctgatttctctacttatagcagcttcagagtattttgaagtataatacccaagtaagaatgcactagagtgaaaggcaacagtttaaattactatacatctgtataaagagtctgtgagctactggtcacttgtttacattatctcagaaggtggcttgtcaagccagtcatttgttcttttctctgaatgtctataatgtgctttggagaaacagaattttctacataagaaatatacatacaagcaatcttttacagcaatcacaatcatctgcatgaattagtcttgaaattacactccagagaatttacaccaattattacaaatgcacattgtaagagaatagacaagttaagtataacttctgctctctcacacatttaaaacaatgctgagcttcttttgctgctagcgttgttttggcagcatcactgaaatgtgttaataatataaggtaagtaagtatgctgatgacagggaggtttgccttgttactggggtatggaattactacatgaagagatctaaacacacacacacacacacacacacacacacacacacacacacgcatgcatagaaatttgctttacttcaaccaccaaagtagaatgggaaaaggggtcaaacgggagagaaaacaattgacctttctaaagttttctactgcctcctgcataaagaaatcccttttctccctctgggcagttctgatgttctattccctacctctcaaggaggaagggagaaagacccactggagcgaagaacccggaatcaatatcttcctctcaaatctaaagaaaggcaatagaattttcaggctcatccctaacatatgcatgaacatgtagaggttttctcaaaaatagctatataaagaaatcctataaggcagatatttatgcagaattagaaaatacttcttaaataaagttgaaatctagctgattctgtgaaactttggcttatttttagtaatagtaagtgtgatgtcatgctgaaacactaaaaaaatggtagtattaatttctgccaagtggatgactccatcagttttcatttgagagcagttctaaataccttaactggggcttatcttccagagtgtgttacatgtaccttgccgattattaacacacccattctcttgcacattacactatatacttaagaagagctagaagtagacactgaaaattcttcctgtcgattccccttctttctttctttctttgtttgtttttttggagagaaggaaggtggggtggggtgggtagggtgacctagaaatttcagttttaaattctttgactggctggaatgtttgtagaagccttaggattcttccatttgttttttagactttcatcttcacagtcaggtcatcatacacaatgacaagtaatgtgcctctttacactacagaggaacaaatgttttctaatcatgacagctaggttaggattagtgtacttacagtactcctacaaatacacattacttcacgcagctcagcttgacctttgtggaaattcatttatttccattcaaacccttcagtgtatattttgttctcaagatggatgattttgttttcttaaatgtccccattctctctggcatcaggaatcacttggctgacatggcttcattgtggcgagaacgtgatctttctagagggcaccgtctgttatctgtaggacaaagagaagaagaagagaacacatggtgagctttagatcctgcctattgcacagtgtcaggtcgagagagcttttcaaacagtcttgaaaaatcacttcaaatgaatatggaaataagctgcaaagagcccggatctgaggcgtttacactgcagctgccaggctgagttcaagagatctgcaatcagcaagaaatgatttttcttggtaagcagaggcagagtgataaaagaaatggaagaattctctcaagcacagaccccttggaaataagcaggtgacaacaaaattcccaggtgaagatgttaaattgaaaagatccatgtacagtgccttttgttaaaaacctcttcaatccccatgaattttcaatttgtatgctgtctacctctaaaggacatcagtgtatgccaagtgtgtgtgtgggggggagggttttcttttttttttaacaatgattgcaatatatggcataacaatgattgcaatatatggcaatcaaagtagctactgagtttgcctgattgtatgatgtaaacaaattcaatacattatatagtcattacaggaatgaataatgaatgggacctattcttggtcccattccccctacccatcacaggaagaataatcactttagagatgactgttagcacaaagcttggaaagcaaagtttaaaagcattgaaagttgctgaaaatagttttagctttaatagggagaaggcttacagctctgcattgtgatgatcactactatattattatcacctctgttttatgctcagcttaaatgcaattgatgtgggtgaaaatctcttcctggcaaaagcataatatacttagattctctatttagaatgagtctcggtccctagaaataatgacaaccaccagcacttacataaatgctaacactttacactagttaatttgctaattcacacaacatccccgggaggtaagcccatttcattccatcctattatctctgctttagtgatgaaggttacacagcaaatcaatggtatgatgggagattataatgcaaagttaatgcctaaatgtcaggcctgctttgttcagaagtagatattggagtctcccaagctgctattcatttcctccctaagatgatgatggcccactagcacatcctgtctctccatggggaggctggactgagaagtgctgaggttttgtcgtgatgcctttctgggctgtgctatcatctcttgtctgactcccggtagtctgtggtcaatacacagcaaaactttcttgcacccatgaccttggcctcattaacaccaccttgtgagtacactgagcaaactagtcagaagtttaaagcatactcattgcttcagaatgcaatcatattgcaaaaaagtgagaaagcaagaggctttctgtacttggagatacatctgagtgatgaattatttgggtatccttttgaagatacaattaaaaaatccattatttaatttgtgatatggatcacaattcagctaaaaatgtgaagataacattcctggataaagggcttattacttagatggcacaggtttgcatacagattagtttgggacttcttagaagacatttaaaacttaagctgcaatcacatggttcccattgcttttcgagaattaaaacttcagtgttctcagatacaagaatgatggtagcattcccagagggttgtgccagctctctgaaagaagtgggtgcactggggatcctataagctaaggtcaacaggtattcatgcttccctccaggaagactctggcagcctataacataactaacatctagtatatcacctccaaaactctagcctcacagtattaaatgataggatgtgaggattcacactagcttgtaatttattggtggcattcggtgtggcaaaatgcttttgagctaaagcaaactgactaaaggacgttaaagcttttagaaagtggcataagcattggttcaggacccaaacctggctttataactgatagaaaagagaactactttagattttctttttttctccctttgatctccccaatagaagcctagtaggttcccaacttagtaagataattacataacgaagaaattctgtaactcatatttttgaaatatcaacctacaaccttgtttatgaagaaaaagccattaaaaacaatgacaacaattttggatctgaatttttaaaattaatttccagttccttatacttatttgaaacctatttttgtcataaaacatatatttgtaccataaagttctatggatcaagccataagtggaagtaaacacatctcataaacacacacacacacacacacctgtattttcatgtctatacatagatttttcaatctgtcttcacgtctaatggctaataatgtaggaatcatgatttttcttgttcaagagtgacttcatatttgaataagaaactgaaatactaatgaatggatatttgaaacataacttccatatttatggtattcaatactaataatcataaggacatataaggacctcataagtcagcatcacatttataataaaaaaggaacctagacattattgctgtcagaagtaacaaagtaattggggtgattgtgaaaatgatggcagctcttgtttggaaacaggtggagggaaggagtaggtggtgtgctatatgatttgagggcttagtaagccctactcaggaccaagttcatttccaagtcaaccagaatttggtaagaaaaccctagataattctccttattcgtgagagacaagtttttgaaataaactctatgtgtaggtgatgctactatggaggttgaaatctttaaagagtggtattgaagtgaaaggtatacttatgaacatgcatgcatgctatggaggcagatagtcttcaggaaatcttccaaatctttcaccaaaggagaacttaagcccttgtcttgcctttaatgtggttctatgacttctaataggctttccatgtcaaactaatgtcaaagctgtccttaatgtcataagagcaagaagctccatgccttctctaagcaaaagtacatgtggcattaatttctaaaccttgttcactattgtagtaagtggattaaacacactgtggtacttactgttctagaaatcactcatacaatcatttatttagtgactatgtaaataacacacaatgtaggatacaaataaatgccattatgttttagatttatacttacacctatgccaataattttgttgttattgtaaatgccaagtaaaataatcaaagactaagcacaggtcaaacacagcgtaaaacttagaggacataagtcagactagaagtctcagttctgcagtatgcaacctgggggtgtacagtcaataccctaataaagtgtatgcccagggctgtatcttgcatactaaatgagatggtcaagttgagactgaaactatgataaaaaggccatgtccactacctcttcttctcttagtgtaatgtgcctctgtagtcctctaaagaataatgcctttaaaaaatattgagctcaaactaggcatgcaatgaggtgctttatcctttccttgtagaaattttgttattaaatgtctgacatataatacttagaacatgatctttaaaggccatgtattcattttatattatgcaaatatatcataatttactagtcatttattttctgaagaatatctaagtatcaatttgatactgtaaaactgtagcaacaatggaaaaatgaccatccttatagttacatccatatgtactccatgtataaaagaggcattactaaggtattcagacataaccccaaatagtattagagaatagttgcattaatttaaatccaattggcagtacatgaatttgtctgtcttatctctttgggtaataatcttttaaaatgtgctaatctaaaaagtgaaaaatgacatgattcattccttttgcattttttcaaatattagtgaggtggaacttctcatatattaccatccatttatttttcctttacatgctggccttgtcctttgagattttgttatgctgtttggtttcgcacatgatatacttaaaacagaaactaagtgaaatatattagaaatattttccttcgttatttgactattttgtgttatggatttttaggactgtatggtttcatttttttactatttttatgtaactaattatgtcaacatttatattttgatatattcttttattcccaactttcgctagtagccattttctagtagacatgtctctaatatccagacattttataagtatcaagtcataattcttcatggtctttaaagtttaatctattcatatgtaattactaaagatatcctcaatttattttctttcacaatgccagataagcttccaaattactttgttccttgttttatttttctttgcaaaggacatatgttgctccatcacaatttggtgagtaatcatcaatgactatacagattcattatatcctttcttatcatactaaaaaatactggagtttctattattttagcataggtattattctgaatttctgtttaaatgctttctcatttcattatttgagcaataatatctcaataatttctctttcatcatcatcatcaccatcatcattattattgctattgtaataattatttgacaggcatgttcttattatctagcccaagttgttttgcaattataatcccctggcctctgtctcttcaatgctaggattaggcatgtgagctttatggtatgttttagtgcctgttggagctagccttcgtcatttatattttcatttaaaacacatactttggctagtgctatggctcagtgctagaacacttagctagcatgtgaaaagctctgggtttaattccttaaaccacccatataaaaatccttatgaggcacaattcagcagtagatatcatgttataataataaagaaccccaaaaataacagaactcaataaacataaccaatggatcctaagtataccctagagataactcagtatttaactggaagtgcactgatgctcagatctgtgtgtccacgtgtgtgtgtctgtgtgtctgtgaccatctgtatatggtttcaggatggaacacaaggcctcatgcatgccaggcaagtgctttaccactgacatatgatacctcccaaatcccttttaggaatctccaggattctcattttcttgaaaatcgaacaaggcctttcccctcactgtcttttgatgggtttttgtgacagcctggccacctttctttgggaaatagagcagagtccagaagtatccaaaagaacatcattgattataccaagacagcaaatcttgttgttttgcttctgtcaaaagtgagtaactgcaattaaatgtatagttttgttacctattgataatgtctagtgctcccagtttgtgaacttcatgttctcctattttgggcatctaccagatatcatttatcacattgtgtttactggctttattccattggaattgtattcacaggatgctatgcaaaagagcatgtgcaggagccaatcaattacctctctgctcaacaattaaagttctagcactatctactctaatgtcaatgatattacagtgtatttgacgcttgagcttgaaacaggtcacattgcataatccacattcttcaaagaaatccatgcaaagaaaacaggaacttagaatactgtggtagttcaggttggcagaagagtggaaagttattttaacaatgatggtaatggaaagcaataatgttaaaatagttcagaggctactgtgactatagacacacaacactcattaactataattggagttaagcacatgtaatgataacaaaatagaccccgaaatgcctttccaattggaaaataagcaaatacgttctgagaaacagcatgcttttgtgtgggaaatacagtattctaattgagatgcacaaattattttcacattgatattgctgagggtatgatgttggtagttttttatgtttagggatatagatctgctagaggtaacatctgtacaaagaatgtatttccttttcttaatactcagcattcgttatgttattaagggaaaagtctcaatagttgcaatggatttattaattcagcagcttgttatcagcatgaaagtctgctgtgctaggggaaaaacaaattatattttataaaactgcagtactgagattaaatcacctttctatatttcactttcttcttatccttcctgccaggtaggaactctactctctatctctattatcaacctcatagtttgcaaactaccaagtcttgtagcaatataagggtacattattaaacaaactcaattatagtaactttaggaagatagaaatacaagataaaagtaaaatcacacagtacaataatattactttaagacattaaaaatccatattaagctacaactatagaatctacgtgatactttctgatactttcatctttcacaaacatgttgcttttataacatgtatactcaacttgttggcattttaaatggctgtcatttacataactgataacttggtatttcaaagggtcttagaaaaatgtggtgcagataaaaagaaaatcagtatacttttcagtatttcaactgccactgaccttgttattgattatctttggactcaatgtcacagctagtgaatagatttttttaaatgtctttggctttgtacattagtcaagcattttattcgcttcttaactagagaaccacattttcgctctgtgaggatgagagtctaatgaggacatctgcataagaaaatatcaaaaatgcaaactaataaagtaagaatattagaacatactaggaaaagttttagaggaaactctctaagtaaaactcatggtggcgagtaaatattggacatcttgcaaagtgaatcagagctgttcatagtggctcatatgcagccgtttcttaaaaactgttcatgaagtcatcacccagtcactagcaatgaatcaggcactgatccttgacttcaccttcagctatgctgtttacacagaggacatacatctttgccatgaacacaaggaaagacttctttctatccttccatatagctacaaattgttactgcataacatatccacctggtacataacaggtaaccttacacattactagggtgggaaggataaatgtaccaagagcaataacattaaattaattatgtgcttcttgtagcagcaacttcattttaaatgcagtgcagactccaagtagagaaaaatcttatcccttcaatgcaggagttataggtcaggcaaaattttaccctcattaggacttaaaagataggtggggcttaaacacaatgaaatagaaatatagctgtcaatttctgattaataaaaatgtgagttttaattctctatattgtggaccattcagttatgcaaagttttcttttgggaggtgcaaaaagggaatggatatataaaaggaaaatcagaataagtatacatcttaacttgcttttccccaaggaaatgaataaaatgacataatgaaaggaaaggaactgtttatacttgtagcaattgtagttggtagctatttccataaggacatcattttaatttaaattctgtttcttaaaaacaattttcaagtatttacacataaggctgcaattctaccttgggacagtggggaagatcagcagaaacgaggctctctgaagtcatctagagaagttgttgaagcctacatagcagtatcgagagtggcagtacaagggatggtcaaggtaaagatgacaatgatctgggccagagtgtttggcagggtgagagactgagtaaccatttggtttggtgctgaataaaatagctgctaaatggcactggggtcaactcattactatcacctgtcatctgtgtgactttctattcgatgggtggcatagatccctgtgactaaaaatacttgccatcagccatttctcaaactttgatcatatgatggacaatcctctgtcattctccaaggcagttgtttgtgatctgcctgaggttcattgctgatgtgctgacctagaatacactcacctgtcatctgcttttgtttcagaatcactctaaggctatacatctagtcttattgttttaacatgtgcaagctagcttttgggttcagattccctatttctagatgatgatggaggtttgatagtactcaggccacttctctggcttaagtagctcctgtgtgggagctttcagtgttaaggcagaaagatggtcctttctcctacgcaatatgtccatctcccaaaagaccatatcacagtaacaaagcctatggttttgagaagatgcttaacctacagtttacaatgcaagagtctataaacaggtgttcacatcactaatgatccccatgctagcctctgcttaattacttaaccagttgtgtggacaaaggcaacctgtgtggttaatattacagacactttagcagctgtcagtgccattgtttttaaaatataaactgtcccttacggtagaagccagtcagcagttgttttaaatatgaacaattaagagagttaacacacagcttctcaatttcatattcacaagtgtctggaaatcctttataattttagtgtctaatacagcccatgtacagcctgagcattaggcaaagactaaatgaataaagatggctactaaaagcttactttttgtggaagaaaccttaatgaaccactttaaatctactggggcaatgcagtcatcatctgatcaagaaaaggtgaaaacacaaaagactgctctttcagatgctttctaagatgctgtttataggtcatcatgagattcaatatagtatgagactgacatgctgcctactgcgctaaggagacgcctatgagattcaatatagtatgcaagttctataagtggcttattctgcagcgggtctaaattattatatagatgcatacatactatagacaaagaagcccgcattttaaagtgtgaaagatacgtaaaccaggaatatgtcatattcacattagtgaaaacatacaatttataactctaaagttttcgaaaggtcacgtaccagtaaaatcagcaataacctctagatagtgggatcatgattttttcatttaggttttggagggagctaaatgcccagacaatgatttttcttttatctgctttccctaatgcatgatattttgatattgaacataagtaatttgttaaattaggggtaaaatgtagataggatgttaaattctgtctttaggtgcaagtcacatactgcttttaacttttaacaaacagaagcccgacaatgttcaagtgagagcctttggagcactcagccctaaaagagaagtctcaatcatccccctcccctcaaggctgaaggatccatgctgaatcgtagttgagatgatttgaagagccagtattggtggatgactccagggcatcagcatttcccacacccaacagcactgaggcacatatggactcactaagataatatgcatgagacctgcacaggttcaaaacagacagaatcctagcactgcaaaggggaggtatcacaaagtcacccccctaagcaagaagatatttgcaactggttcttgttggggaagggaaaatcaattttctccaatagtgtcactggctctatcaaccagactccatagcaggccccatgttttggattagttggccagtcacaaatggacaccatgttttctagtgtactctttgttttcttttggtacttttgtaccaaatcaattcctggttgattatgttgttacttaatatattataatgaagagggaaaataaatggacagaaaacaggttcaattacctgttttgtctaagggcttcagaatattttgtgataggaaacacaaattttagaggctaataaatttgtttccacaattatcaattataaatacatatcgcatatcttagactctaacttgtaaaatctgaagagttaaaaagtgattctcctgtggggcgttggtggcacacgcctttaatcccagcactcaggaggcagaggcagatggatctctgtgagttcgaggtcagcctggtctctagagcgagtgccaggataggctccaaagctacacagagaaaccctgtctcgaaaaaccaataaataaataaataaaaataaaaaataaaaaagtgactctccttaggagactgtctccacaaagattggccaggatttaaaagatagggaggtgtgcaatgacattatctgtagagagctttatcttaccaataaaatcacatgagataacaaaagaaatgactaattcaaacagttaagactcttttcatagatggtaaatgacagactgaaccatttttcggaagacatcctggtgtgatggctaattttggttatcaacttgacacatctgggaagaggtaatcttagttgagtgtatacacacacacacacacacacacacacacacacacacacacacacacacacatcaatcaacaaggctcaagtgagaaattatctctacttatattggatagccacagctaagtgtttcatgtaagtcaaattctcactgcatggccatatgggtttatatctttgttctgcctcttaatagctatttctccatttatgttcctccttgtcaccatggaaataataaataatattaactatctacttagcagtatagttaaaatgactaaataatggcaatggaacatgatggcacgtgatatagaataaaagcttagtgtctttaatacatgccattacaagagtcaaatttcaaagatttcagtggacagattttacacgttttgaagtctagacagactaattacagtaccatgacaaattttagccacttttgagccgatgagaaagttttcaaatagatgtttttaaacaatctttttcacattagtccataaaaaagacttaataaagatcagacaagaaatcagaatttaccaaagttctgactttgtatttatttcacaagtcatcacaggctaaggttttttatgcccttgggaagcaatgaaaatcttttatactatatatttatttttcttattgtcatccagtgtgtatagaaatgttgccagtctgctttctatttcttctctgctttaggattccagttgtatggacagatttgtcctaaggatagaaagagattatttctagagattccagcccactttgaatgacgcatctaggaaaaatggtcactcattttcttccctcctagaagagcagttttaccaggcaacctgctgacctttaatttgctttcctgagtagtctagtcactggaaaaggtatgggggggtatgtttgtctttattagcagactcttttccattttgtgcattactcttgctataccaaaacaagcatgcaatttatttcaattacgctttctgaagagtgactatgtgccatgcattgtgtacaacaataaaacaataaaggtgacagtatcttctttggcagctatggtgtagtgtttgtggtcttttggtttaaaaattagcttgacagagatgttaagacttcctttctaccctgctacatagttctcaaggagtttggttgataactcaaaggctatattggatctggatattaaaatgaaaagtcaaccttcttcctaaagttacttttcactccactagggtagcatacaaggataataagaatccagtgacagtgtggccaagattagggtatactccttaggaacacagataaagtcttgggagagaggggcatgacttgaaggaatttcaatagtaggtaatattgtaattgcttgaaaagaagctaaggctgaattgactgggaggaaatgtacagtctaagggggagacattgtattgcggagaaaaatcagtatgcatctataagaaagccagtagtaattaaaaacaagacattatggccagatgactgatacatcttatgtaccacttttaagtctcttgaatttcagattatgaaatagggagtaaactgtaatatatagtgttatttgacgatcatgtggtagattaatttaagagaggacaaataagaattatggattaactggacatggcagataaaggagtaaatgctatcttgaaagcttctagtcttacacatatacaagaatggtggctccatcacctaagataggacttgcagcaggaagaagtactttcaaggaaaaagtgatgagttctgtttagtatttgtcaagctggagatgccttcaaaatatttgggcagagatgaccagcaggccataaagtaccacaagagtgaagttcagtagagagacttggccaaaagtaagagcaatttggggctcactggatgcatggtaaatgaagccatcacataggaaagtacacagactgaggttcatggcttactgatcagattcagggaattgctgctacttaagagatgagctcaggaagaggaacccttgcagaacatagacagtaaatactcagagaggcacagaaagtaagtgtgcattgcacaaagcaagggagatgattttgaaaaatggaaaaagcaataacatcatatactgtagaaagatgcagtaaaataaagacagaaaactatcagatttagaaatatggaggtcattagagaccttaatgagagcgatttcaatgaaataaggtgagcagaagcaagactacagaaggttgaagaacaagtggaggcaatgaatataatttacacttgcatttttcatgaccctgaaagaggtgatattttcttagagcaaaatcagttacttcaggtcattgtgcctgacatgtccaataccattttcagccagaaattgtcatatacatacataactccttcaataacagctgccattgattggaccatgatggacatctgccctccccatgggaagttgattcataggttgcctagtaagcaacacatggcattgtatgtgataacaaggtaatgcttaactgggtagtaagccagtttaatataaatagaaaagaatgaacagacatgcagaaagaagtgaggcctattttgtttcttaaggtgcccagagtgtttttctgttgcaaaatagtccaacatgaaaaaaaacaataataatagatattccaggtttcatagctaatgttattaaaagtagatagtgatggcccctaggttattatttctttgggcaagtgtatttatagttgtttgctttcatttataaggtatagtaaaagctatcggcattggtatatcttatagcattttgtaagtaatgaattgacgatgtcaagacatttttatacatgtatttgcttttgcattgcctgaattatcccagggtgtgatacgatttcacctaacagtgtagacaaattgcacatgagaacatgtgacatagcagtcaacaccatgatcagaatcagagccaatgtattaagacactgcaataatcattgtgattgactttaagctctttattctttatgaactgagtggaaaatacacattgaataattctcctgtccctgacccaaacaaaaatggattagagagttatgaaaatttcagtactaacccagtctccatatgaatagttcaattttacaaagttttttagtagataccctatttaaaccacaaatttgaaagttttctcagtttcctttcaataatggatgctggtgatcccaaattctatcatgaagtcttgaatttacaatgtgggattctgtccagcctatttataccacacagatttgctgcatacatatcagtgaagtggaaaaatataggtagatcacaagccacatctttctagtattaagcctagcatctatggaccagaaaaataatgctggttttatttttatcagttgtgtagtgttgttaattacaacagaaggaattcacatttcttttttatatgttgtcactgaaatggtaatatattataaattattttagaccaattattgtggctggcctagggtttctttttgtggctgccataggtttctattctcactgtatcgggtctgcaatctcttttattactcctaaaatctggaaaatagtggaccggccagatcaatcactacagtgaggtttcccacccttcaagtcatcttccaacctgcctttgtaagcagtgttctcaaagagatagtactccccagctcaaaaggccacagtggatttgaaataagactaaggtggctcaaccttaatttgaagtggtttttaaaaaaaggacaaaactgcaaaggaaattgttacaagttaactttcagaaggacttcagagggctcacatattaaaattcactgtaagataaaacacatgaggataaaagtgaacagattcacactaaaggaagtagctctgggagattagaatacatgtgtgacatatttggctctcaattctgtggcagcaaaaaatgccaaggagaaatttggaaagtatgcatttattggattctttttgtttgttcacaaatcccattccacccaatctgattcttcccaaatcttgactatctccattgaatctagctaggtttgccttcacaacttttctgtgaaaatggccacctatccatgttggatttttatgcatgcattcttctgtccccttccttctattaaaaactaccagtcattgaaaacccaaatagaatgtcatcttcccgaaactttagctttcatttatctttctttcctcttgactctaatatacaaatgcgttgtggaccctacaattcagcttttaatttatagacagcttcctagtcctcactatcattttgtgtacagcctttatgagaggactgcattgggctaggccagaatgcatctctactacctcttgatgagttcttgcaatacaacccaggcatgaattaaatgcacattgattctttttcttagtaaaacttttatgagcatttatagatatataaatatgtcacttgtttccataaatccatatttgtgtgggacaataaatattttacaaatgttatgttttcaatagagacttttactatgagtctaattgcaaactgttctagagatagccttgcatttttaggacaacttagagaaaaggataatatgtatggttaagttgtgaagtagtgcatgaaatgacatttagcagcctggagtgttccaatgttgactacataaaaagagacaatgaattgaagtgaaagagacttccttggaaggctctctcctgaccgaccacattacagtctcattttgagatcctccattttatcctattctggatactagtcacacagaaccatagccatatatatcaaaatctcaagaccaaggcaaaattcatacacaatgcttctaaccgattctgtcaggattattgaactacttttgtaaagatgcttcagtagcaagtactgtcttatgggttagaaaaaagaacaagtgatctagggagaaatctcactatttccacaagtatgaaatgtaaagtataaggaaatttcagagtatgattctattaaaaacatgatactttctacaatggctacatttatcaataggcttatcttgaatccatatcatactcctacagtagttttctttttccttgacctcattgttgttcatgatacttttaacaattaatcctggcacaaactctcttcctttggcttgtatatcatcactgttccttcatcttcaaactacccctttgattggtctatgttttaaaactactgttcttttctttctccctatatataatggatcttgtgggttttattctttgcccttttccatattattctacgtatttcccatgagctcttttcatgggtatatccatctatgtggaaaacatcaactattcttcctcctgtatggtaatggatctaaattcttgatttcctaggctctaagttacagcttcaatcatctttcaataaatcttcttattgtagtaaagctaccttatatccaatatgcaaactagactgatttccccttttctatttgatttcccccttttcatgtttccttgatttgagcatttggactatgttatttgttgaattgtttctacttaaaattcttactttttagtattaactacttgcatataagaatgaaatgactttattttgagatgacagcatctttgttgaggtagacaagataaatgaaggtattatgtcaagtatggtgaaacctcagttttcaggaggcaaaggtaggagcctaaggatatctagtctagcctaggtgacatagtatgtttgaagctaaacatggctatataaagaggttaaggccagcaatgcctgcatagtaagtccttgtttcaaataaattaaaacatctccatggaccttattaccttatatttcatataattataacaaggaataagttagaaacaaacataaacaaacatacatgaagagagagagagtaacatttgaagatgaaggaaagaaacaggtcagtgtttctacccttaaaactaccaggaactaggagacaggtctagacaaggaccttccttttatgtttcttttttgtttgtttgttttgttttttttgagacagggtttttatgtagctttgaaacctgtcctggtacttgctctgtacaccaggctgccctcagactcacacagattcacctatatctgcctcccaaatgcttggattaaaggcacgagtcaccactgccctgcaggtcctttcttaatgccttctgaggaaggacaggttcataccttgaacccagtttttagcatccagaactaaaaaaagggtacattcttattatttataacacttggtttgagggattttaataatagtcctaaaaagctaatatagccattctacaccaacacataaaattaattaatacacaaataagtaatcacaggtatatatttctactcagcaaatcagttatttgtaattactttatcattttctttttgagacaaggtgttaggcattgaagtcatactttactccctcatcctcctaagtgctggaattatataccatttctagctcccgacccattgtcgaatctgtttcctcattatcatgtccattaagctactccatgacaggtttttactttttttttttgagatagggtttctctgtgtagctttggagcctgtcctggaactcactctgtagccaggctggcctcaaactcacagagttccgccttcctctgcttcccgagtgctgggattaaaggcgtgtgccaccaacacccagtccatgacaggtttttaacctcctatgatctacactttttttttaaaataaaagattattattattattgttattattattattattaatattattattattgtgcatgtatgtaatgtacacacaagcatgtgccaaagctcacaagtggaggttagaggagaactttcaagagttggttctctttttctaccatgtgttccagttattgggcttgcatgaaaagtcattttaccctctgagccagcttctggtcactattgcctatattcttagacaagactctttacatctttcctgcctttggtcttaccctcactcaatcaatctttcacactgttaggaaacagtcattctatgagggcatatctgatcacatcactgtaagttacatcctgaaatagacccttacaatatccacttgacttcctagtttttatatctatgttccagcaatgctaagcatttggctcttgcttgaatgtattatgtttcctattacctgcctctttgttggatcatgctccttcttctttttatctttttccatttcttacccaagaaattctggctcattattaagagttagtttgaggtttataccatgatggcccctgtctaatccctgcctctttcattacaaactgtacaaaggcagacatttccatttttcctgttttcttgggaccaagaatacaatagacaggaaattatatataaatgtatgcacaagtgaacacattcctttgtttctgcccagagaaagtaaaactattacagagtgcaacgttcatttgagtggttaagtttctatgtatctgtacccatgcatgtgtttgtggcatgaaaagaattcatttgttaagtcacttcagcctcaattgagttttctggtaaagagagaaaatgatatctgtctttcatagttgtccaagaaacactgcacttcttttaaatcttccattgtgctttgccgccttcaatatgacaggtctattggagatcaattagttcaatggtcattatagggcagaattaaattcatctttccattgtttcgatatttttaggtctgtcaaccctccttagttatcttgtgggagaatcacaggcagttactttgttcttcctatactacagtgacacttgagaaatgaaactcccccttcctacagaatgcctaattgctacttttttcttcagtaacagaaatcctccttgataacattctattttatggagacaagaggctaagtgatcctcgttttctgataggttgtttaggataacagacactccattccccctgcctcccaacacttcggtgacttcagtcattctgtatttcttgtagtacttgagatcatctttattatcttcagaatgtaagaagattgtgcctaggaaagcaaatatccatcttcttgttccccaggtaggcctagagcaccaacacacacacacacacacacacacacacacacacacacacnnnnnnnnnnnnnnnnnnnnnnnnnnnnnnnnnnnnnnnnnnnnnnnnnnnnnnnnnnnnnnnnnnnnnnnagagagagagagagagagagaatctagttaacacattacaagaaaacatactgccaagaaaaaattcagtgctttcttgtgaaaacagtagcgagtcccttcggaacacagcattgaaactgttccactaagcctttaatgtgaatttgctcaatgggaccgtgcatacaggtgtacaacaattattagatttgatatctgaatgagctcaggttcccattagagcttgactgcttcaatgaccccattattttgcttccactgctccccgaactgatcaacttaattattctgactaacgaaacatttaggacatgaatttctgatttgttttaaaccatgtgggacatctaaaagtgcttcacttaaaagaatcacaatatagaaacgactatgtggatatgttagaaactgggaagtagagcagagccatgatccatgctgagcacacagatactctactttcctggaatggctcttctgcttagatttctccttggtaccagttaggccttagtgatgactctcgtacctggaatatgcaatgataaaagcaatgtgcccgtggtaaggggcagggaggaggtggaagtgaaatctttaattctctgttataaaacattccaattcttaatgtagctaatgttcaggacaaatgaaatgctttgcagaactagccaatcatagacattcttttgtaatgataaaaaagagaagtcagaaagtgggaccaacttcagagttgatgtgtaaggaacacaatgtcttattagttgaatattgttgtctaattacagtcttgaatataaagcatcatagccattacatattggatttaagtactaagtataagcaacaaggtatattagcaattgtatgtccctggcataaacaacatcatcaagagagaaataagtcatagtcgattcataatttgtctctttaaaagcagctccaacatcccctattatttcagttttcattgatgactcttaaaaagctgcgtgtttacctagatgaaaagaaagcattaaagtgtcactagtccctcaagttttacagatgccagtttatctctcatcagtgaaagcatttgtcctttaaacaaatagaactgacatcaaaatggtcccccttgccccttgcctcctttcactaatgatatggtaagggcagctgagcctgcaataaatgtgtttgtgtccagtcatattcctgtcacttttcaacctaattggactccttaaaaataataattaaataaataaacgaggaaggaagtcacaagagagtagcacaagttcctgcttccaggtactctctggcatcagccttcacttcgcacttctgctcaaagtacctgatttgacaaagcacacagaaaagtcagagacaggtctcttttccttctctcccaaactgtctgacaggagtcaataatgatttttgaacacagctacaatctaaccatcagagatgaaagtgtgaggggaaactttcaagctattccttacaatcttttattaaagaaggatgtaaaaatacatttgccttcgtggggcaattttcctcctccggttcaacttaatccactttaacagttggcagtttaaataacagaagttataggctgccatgcacagacgctttgcatgccacatgaaagcaatgaattcagaggcaggagcaaaaccagaaagaacctgaaagaaaagaagcccttcttctctataaaaggatttctttaataacagcagcgtggaaaaattctctgagcttgtgtccttctattgtttcacagaaagaagctatcacatcctgtatcccaactctacatataccaatggactgtcagaagccaacaactcttccctaatattgaaatactcatctactctggttttaatgcactcaaagcacattttcttattatataataagaaggacagttctcttcatgtttgcaatggaaaatcatatattgtaaatacaagaatcttaagagcagtctatccataactaatatttttaggctaaataaaatattaacacttttattcatgcttgggttaccatttgcaattcagctttttgcaatatttaaatggaatttcatatgctataaagaatttattttttaaaatgtagaaaactttaaggttggttctttctcgagtgccttatcatccttaacgtcacacttaccttctggaatccttacagaaaactttaaagacctcagatttgatattagattttatggtaccactattagctgttcactacatatctgtgtccaaatactgttactggattttgaacttgtgcacaatgttcatttgaactcagtgtaggtatttttttttttaaaaaaagatttatttaggagttgaaagagggatggctcaaaggcttgctgctctttcacaggactggagcagggctcccagaacccatgtgagtaattttacaattgtctgataactgcagcttccatcctctgtgaacactatatacacacgtgcacacttgcgcgatgaatgtgtgcgcacacacatgtacatgtgtaataaatcaaataaatcttttcaagtaaataaaaggattatttgtgtgtcaatgcacgtgtgtgtgtgtgtgtgtgtgtgtgtgtgtgtgtgtgtgtgtgtgtaggacagagagggtgtcacacatcttctatcactctgcatggcctttgaggcagcttactacttgggtgctgagattcaaactccagtcttcatgattatacagcaagcgctcttgattatggagccatctcttcagccccaactgaagtacattttacaaaataagtattagcattcataacataatccacaagatcctagtatatctgggctataattagtagcagcaagaatgggagacagcaagtttgtgtacatgttggtacacaaaaactaactccctacatacttgtcccatgcactgactttggtagaaatgatgatgtccatattcttagcaggccaataataaatacatctcctataggccaagtgtgaatattttctttggaagatacagataaaaaatcagtaaaacttagcaagtagatacataaggtacattcctgttgagttatgagatgttgttttactctagttttgtatttccttccatgttttggcttcctggctttaaagtatattaaagagaagaatgggcagaaattttgcatcagatgataaccgttcctgcagtattttctgatacatcataatattatctattctggtatttggtaatgttgagtcctttagtcctcgaatgatactttacaaagagtgaaaactatctactacttcacaatcaactcaaaactgattttcccataactttcttttcacaggttacacattcttaaatccatcagtcccacagctgaaaacagatcaggtagcacagcagttttcaatatatcaatatagtaaaatatatgtatacttataagaagtcttacagagttgtataaaagtttgtgaataacaaatgaaacatagaattttagagctgaaaagaaatttatggaatatttaactgaagttcaacccttcattatatagacaatgacactaatttccagagaagagaactgacctgtcataaatattccatacaatgaagaaatgaaactgagagggagtgggatgtaaggtaatgaaccagacaaacataattggtctatcattcatttattggataattatatgactcaacttcgataaaatgtatatttatgaaggaagatagtgagaacatgacagccaatgatcatctgatgtttctaaataataatcattctggtgaagcaattaggtagcaacagtgagtttaaaactcctgcaaatttatagtaatacaatattcaatgatttaaagtttaaagtctctaggtatacactgatataaagatttgagaggaactgaataataattgtatggactagcaccttgttgagatatactttgggatagatgcatatttaaggacttaagcatacacttaatcatacataactacatatctggtgcttgatactataactttattaaaaggtattagccataattaagaatgaaaagttaaaagccaactgcattgccttctcaggcaatttcattatggtctacactgatggccaaaagagtccaaagctgcggcatcacactgatacttactgtcactgtgtttgtcaatctttgtccttaccttaatgctatttatgtacagtatatgctttagtattcgagtcactgtctatcgcattttgctgtgagctgggtatttttaattcaaagctgtcaggtgaacaaataaaatgggagctctgtttcataaaatctgtgtttacaattatttcccagcatttttatgagctgtacattttccatagaggtattaagaaactttctagaaagcaatacctttggcatgcattctttatgccacttactattgggtatatctgttttaaagtgctacacatgatgatcctttgacttaattcaactctataattttgtgaacaattacatcctaccaagcattcttactagtaggactggtaaggagatggatatttatatatacatggtttatgtaaatgagcctcataatattttggctcaaattgctattgcttcaatatatccctttccttgtcttaaacaagacagctttccagttaatatatgttcaagattgatacataccatcaatgcctcctgatgcctacttaaaatactggatagcatgtggttacctttccaatctcaataacattctgtagtcataaagaagctagcaatactgcatctcagtgcaatatcttttttttcagtgccaagtttggagccctgggtcttatacacgccagccaagcatatcatcaactgacttacatccctaggttagtttcgttcacttttatcagtggaatctgtttttcttagtctttgtgtatatgatgcttgcacatgtgtatttttgtgtgcagaatagcatgtgcatgccatcaagaacatatgaaggtcagaagacaatctcaggtgtttgttgttccttgtcttctgccttattttaagtggagtctcttgtttgccattggactggaagctcctgtgcattctactatttccatctcccatcttgatgtggtaatggtgggataagaaatgtacatgctgctgtgcccagctttatgttcactctgtgaatctgaacttagatcctttgcttgtgcagcaaaagctttatctactgagcaatttccctagctcagtgcaaacttaatgatgccatgtgataagtcagaaaacttcctccatgttacaaagcatttctgtttcaagcacccattgattgtaccatttacacattccagtagctcagtgattcttaacctatgagtcatgacccccttgggcgtagcataccagatatttgcattgttgttaattacagtagcaaagttacagctatgaagtagcaatgaaagaactttatggttgggggtcaccacaacatgatgaaatgcattaaaagggtcacggctttaggaaaatttagaatcattgagataacttcttatttttttatttatgaattataaattatgactttacaaattttttcttaatttgtattagtttggagttcatgtgatgataaattaacttcccactcttattggtcactctgccaatatcatgctattttctaaataaaaattcaaaaaagttttatcaactcataacttaatttaattgaaatcattaaactagaggagagtttggcttcatgtttggattccatttaaattgcttatataattttaaactacttcgtatcaaaatttccaaatgcacttagaaggaaattttatagcaacaatatacatttttaatgaggaaaagcagcttacttatttttaaaaagatctttctttaaaatatgctgctttctaaaaaaatattttatatgctttaaactcagctataacccaagcacacagagcagattcttttcaccaggaaacagccatttatagggcacagcagaggaaggaagcacttgctggaatggcctgtgaggacaaccgactgtatgagacttagatggctactatcaagtgacatatccactatggaatttgtacagaggcatgcttcttggtacatagtagttagtcaatacactcaacgtattagctgcatataaatctgaattttagcatctgaaggctcagtttatcagcttcagggagaaatgggaaattgtctatcattttttccctacttgaatagcctggtgtcatctgcgtgcaggtccttcaaacaactgataaggtcaagaaagagcaactgagtattaagagagatgagggaaaataagttaataacaagcttatactgtctgtatttatttattcggagcaaagcattcacactgtggaaagatttcaagcatgatagtcaggatttatgaggaaaagatttgttttctcattactataataaacagtgatcaaaaaatacttcctcagacttccagcagataaagaaaggagatgcaacttcaattaagtctttgatttatagataatgttgcaacatcacaaacaatgaacctcatattctaccgcaatctatttgcaaatatgtgtgcatgtggatgtgttttaggggagggataggggatcatttttatttcattcttttcaaattagtatgcacttaaataaataatggtttcagaaaggaaatgcaaatgaacattaaacttttacattctttcaaatccttttccaatagatgtcaacatacatgcattgtaacagatatgattagtgtttatatactctcctgtgattttattctttcacttaacattgtttcctacatccattttcattatttgtcaagtaattttaccaccatcnnnnnnnnnnnnnnnnnnnnnnnnnnnnnnnnnnnnnnnnnnnnnnnnnnnnnnnnnnngtattcatttatttagtagcaaaaagtggttccatatgatttattatataagatgttttacatataaattttctctcttcaccttttctccaatgtcaactgcctcatgacacatatctgcaggttcctcaaacacactgtccaatacaaacacaattagatttgttgacaaatttgttgcagacagctgagcacagggactacaaatcatatttttctttctgccaatattttatacatggcacagattctacaaccaaatatttttccaaagtctaaaaattgccacaatggcacaaactttgtttcatctgttcagatcatataagctcttaatctatggatgcaataaagaaaaataagaaagaatgtggaatgttcctttacactgtatgaatatatgtcactgggattggattaataaagaagctggttagctactagccagacatgtagaggttatgcacaacaacttgcagacaaaaagagagtacaaagcagaagggaaagaatctaagaatcctgaggagacatggacagaaggagagaacttgccatagtgaaaaaggtaccaagcctcatggcagagcatagataagaaatattaattttaaattaatttaagtgttatctaataacaagtctgagctattggccaagcacttataattaataataagtctcagtgtggttatttgggaactggctggcaggacagaaaagggtacctacagaagtagaatgattgaaagtcttcattgaacaaatatttcagaaagttttctattctcaactttccaaatgaaaagcatactttactcttgcttctcattagaagtctcccaagaaaaagggaacccacctgtatttgagtccttgcaaagtctttaactatgaaggacattttctaaattatttttaacttaaaagtactgcttggagatcacatattagctctggaataacttcaactgataagtgtttcacatgcttgtggatgtaaattgggggaagttgagatactgtaatttaacatagaactaataactgtttacaacttaggatcttatctatctgaattttggatatcattgtaaataagaaagtatatacacataagacaattgggaaaaacaacttgtgtgtcatgcaaatagacatttatggcttgggataaaaatgataaggatgctatcctacaggatttaaagtgctgtattgtactatgtacttggagaggaatgctctggggaactgttagatggctcaaaaatcagtgttaaagctgttggaaacactattgctagtgataagagtgaatatttgaagtaaactatttttacaaaatggaacagtggactgaaaaagccaaatatattcatgaaggtattattctgtatcgtatgcaatttcagtatatctgtggaactaaactaaatatcataattaggcattttatttatttgcctattgaatatatatttcaaatatattcccaaaattccataatattcataatggacagttaaattttagaaaactttattaggaagatgaaggctgagccattgtattagtcaaggcctattgagtccattaagtaagctgcttaactgtcatctgctccgtgccatgtactgtgtgaaatgaatgacacctcagtaattctccaagcaatcctgcaggatggatgttatggaaagatttttctttcaaatgaggagtgagcctccaagaaattaaaaaccttactcaagatcatgcagctaataagtgtgaacatctgcagacttggagaatccataacctgaaccattatgccatatgctttccacaagttcagagtgagcatccccaggtctgtgactgacaggatgacgtttgatgtaaaacaaaggtgaagtcagaagtaggacaagaacaagtatctttgtaatccataaatgcattaccatcttcaattctcactcttttaatgcattttttatttttaatacatttttaaactaaaaacatgaagaatactacactcatgttctatttagtctcatgattctagttctgatgagattcttgaagaaacgttttggagaaagaaatgtcttcctttgtttcacttacagcatctgtgtgtccacagggcatgaattaacctgaatcacttcatttaaaaaatagatgtattttatatttaattatgtgccggtatatctgtgcagggacataagcatttgagtcctcagatctcctggaagtagagttacaggcagttgtgagaccccagtgctggcgctgaaaagtgaacttgggtcctgtgtaagagcagtacaagctcttaattgctgagtcatctctccagccccttgctttactttctaaagcatgctagttctgcacagcttcccaggtgagttattccctaaactatatatacatcccctttctaaacactcacatctggaatattaccagtctactgttttctacggtttgaatatctgtttccccctaggatttatatggaaacacttcccattgtaacaatattaagaaatagggactacgggaaagtgatttttaaaaaaagaatcagtaatcataataacctgcaacattttctatagcttatgaccctaatatgaactaatgaataaaatacctcccatttggatgtcagtgtctttgctgctgctgatcaacaaaatggtgaccattgtggctgcatgaacttcctgtgctaagttttcaactgaatagttgtcagtaattccaagtcactctctcaagacagaggctgagaagacagagcttggcagcctgagaaagcaggctagcttctcttattttcatttttttccctaaatgcattaccacatccacactgaagctattctgccacttctcgtcccgctcaggaacctcacaagagcttcctgccgtggatccctggcagcttggcattttactgtcagtgaactcagaatagctgagtgtcaacggcatactctatacttcactttccatacctcttttgtgctataaattacctcctcgaattcatcaaagtgctaatgtttagaatggaaggagaaatattaagtataaaattattctccaatttaaaaaaaaaaagccagcacttccttacagtgatcgatggaatttttttctttttagaaaacattcaccctgtctcacattgataatgaaaagtacaccacaacagcagccaagaattagacacgttagttgtccttcctggcaaaactgaaagattaatctactaaatatccaattttattgtcatcaatccttacaaatggtccccctaccaggttgctttctaattccatatgcctcctacatatttcaagagtttaatgtttatcattacttcattttcaaagttttatttcttactccagaaagccttattaatttttataatactagcttttcagatggtaagattacagaaaatacattttctagctttcttagtgatgtatcagttgtatgaatgacaattatgaaattaaaatgttcaattagcagaattccaattttcctgtggatgttttaactgaaaacaaggaagacaagattggtaaagcctgctgtagctattttaccacacaaaagagatatcatactaagagtgtgctttgatttgtactgccaaaaacaaagttaatttacacaatccaattatgattactttgggtagtgactgtgaatttgaaccaagtgtattggagtattaataactgttttgctttcaataaggaccttttgaagaataaattcaaactgattaagtggtagtagaaaaatcactgaattagggctcaggaaacttagggtcaaatctacctcagcctcattcaagcaggaaagtgttaatgagtaggtggcctttcaaattctcagtctctaaagctgagaaatgaagagaatatctttgtcttaatatgctcatccatttcttaaagatatgaaacaggatgctgtaaagttgtttataaacagcttatactagcttcctaggtaatgctaaagtttcattatgattcactctgttcagaacaaagcccatttaaaaatagatcctcttttcaaatgagttactatgtatctttttttattgttggtttggcataaatggatgctttcagataatacatggtttttctggctatagtcatagtagacagttgctacatagtcttaaaaagagctcaaaggaaacagctttgtttttattttgccattttctttttattcttcagcacaaactattctgatgatgtttaaaacggtgatatcaattgacactgtcatgatctggaaatgtctgcaaggtccaatgggaagtcttagcaaatgtcagagtacctctaaggcaaagcagatcctcaagatagataatgattagaaagtttagtactaaagatacagcaggatgctggggaatggtctgcctgatgctcaaaggtcaggcagaaagcaagtttaatgcctaggaaagttaaaataagtcaagtatcattgtgattagtgatgctgaataggtacagggcaatgtaagaaatgcgaagtcaaatatcacattgcaagatgtgtcaaaatatatactttaaaatacactgtttcctttttgacaattacttagaaaagtcatcaactgtgcagacacatcctggataacagttatctgtccaagaatgggtcggctactgtagtcgagcagcatttagaaggtaccagaatagaggataattcacagacttccagagaagaaaatttatgtgtatatatccatgaagccatcctattggtcccacacacccatcaatatctgaggcaggtgagagagctggctctgtggtcctaagagtggagagctgttactgaccctcaccagctgcaacaaaagggagagcagaccctgaaccttgacagggcagcacaatagagactcctgttagctcaggtgtgggtgaaccagccctaaaattctgagcatgggagagttgtccccattacccacctgtcttgtggcagaatgggcagggagagctggcctcctgccacacacccccacgctcattaatgcctgtggtaggtgggagagctggccctttggtcataagactaggagagctgtccctgatccatactaactacaacacttgggagagcaggccctgcacctagacaggacagtacaatagagccaatctggttggggcatgtgtgggtgagccagtcccgacattgtgagcatggaagagctgttctcattatccatctgtctcatggtggcatgggcaggagagaattgcactctttatgtccctctcatcaattcctggggcaggttgggcaatcttagttcataagagcaggagaagcaaccctattagcatagatgtgagtgaaccagccttgaagttgtaaatgtctgacagctgttcccatttctcatctggtggaccaatcatacagctagctgcccaggtctagaagcagggttatgacttgcttcactccaacatacaccccatcaatgacctgcaggagcacgtgaagacatctgacctgcagacacaagctgcaggacctccacaacacaggacaacaacaggatatccaagaggagtgccagtgagggcccagcatcaatagtgtagttaaaaccagaggcctcaaaccagaccaatgactctttgcaatgaacacttgaaagtaaagctatatggacaaaagggatcattgcgtgatttactgagtcacactgcagtttccatgatgaaatattaattttttcactttttaaattttttctcataaattttattggtgagggggcaaggacagagggtagatgcaatgggacagggaaatgaacagaatcaagatacatgatgtaaaagatacacagaataaatttttaaaaagacatcctattggcatgtccatcactggcaattgttgattttaaagggaaacaaatgcatgcatcaagacaacacaaatttgcaggagaaactatgtattttaatttcaccttaaatctggtcagaatattaaactcatcaccatcacaggaagtggctattttgcagtttatggcggtttctacaggctagactgcaaactgcttgaggacacatctatactttttatcgcttaacatctatatagggcttgtcacaaaacttgtgcttaaaaaaagaaggaggcttaattaaacttgcagatacttttctgtcagtctcaaattgattgggagatgatcaaatagcaaatgaatacaaatgaatgtcagagatttagatgaggtggcaggcagtttcttttcaaagcattgcttgcatttcgtgttcatgctggcacatgggcagtcctcaggaaaaactgagatactagaaagagaaggtgatgctaaatgcaggcctcaagaggtgggtgaggactgaagaaggtctctcacaacactgttgaaagaagcttacaatggaactagaaaggggcatccttcattaatgtggtgcaagttccttcattcttatagtatattgtcttcttccatgcagtggtaatttatcctaattttcaggttgattgagatcatacaaatgaaggttaaaagaagccaggaaatagctatctttctctagagctacttctgattttacatgctaagagcttcatgccattttgttggttatgttttcacagtttttcttgatcagttcaagtcaacagacatttactctgtttaacatgcagataggaccaaaaagtaagtacataaaatagaaatctagtagcattgtatgagtacttttaaaccattttacttcataaaatgtttgttatactttatggaaaataatgtgagctataatgactcttctggaaatcagtatggcggttgcttagaaaaatgggaatcaatctacttcaagatccagccattcctctcttgggtatannnnnnnnnnnnnnnnnnnnnnnnnnnnnnnnnnnnnnnnnnnnnnnnnnnnnnnnnnnnnnnnnnnnnnnnnnnnnnnnnnnnnnnnnnnnnnnnnnnnnnnnnnnnnnnnnnnnnnnnnnnnnnnnnnnnnnnnnnnnnnnnnnnnnnnnnnnnnnnnnnnnnnnnnnnnnnnnnnnnnnnnnnnnnnnnnnnnnnnnnnnnnnnnnnnnnnnnnnnnnnnnnnnnnnnnnnnnnnnnnnnnnnnnnnnnnnnnnnnnnnnnnnnnnnnnnnnnnnnnnnnnnnnnnnnnnnnnnnnnnnnnnnnnnnnnnnnnnnnnnnnnnnnnnnnnnnnnnnnnnnnnnnnnnnnnnnnnnnnnnnnnnnnnnnnnnnnnnnnnnnnnnnnnnnnnnnnnnnnnnnnnnnnnnnnnnnnnnnnnnnnnnnnnnnnnnnnnnnnnnnnnnnnnnnnnnnnnnnnnnnnnnnnnnnnnnnnnnnnnnnnnnnnnnnnnnnnnnnnnnnnnnnnnnnnnnnnnnnnnnnnnnnnnnnnnnnnnnnnnnnnnnnnnnnnnnnnnnnnnnnnnnnnnnnnnnnnnnnnnnnnnnnnnnnnnnngggaggagggatgggggtgagtggagggagagggagaagggacttgcatgtgaaacaaggctgttccctaacttgaattaataaaaaaaagatttttattttctactctgtctttatattcctatatcaatccaattgaagagttccctaatgtaagttggttgttattatttatagtatctatcagcatacataataatattatggtataggggatggggtaatggcttagtgagcatcactggaggcctcctgaaggcctgcagtcccagtgcttggaggtggagacaggaatatcactagggttttctggcgaggtagtcttaccaatttgctgagctataggttcaatgagagaccctgcctcaaaaattaaggtggagagcaatagagaaacatccaaagtcaatctcttgcctccataattacacccacattaacatatacacattcatggaacacacacatacacacaaaattatcttggtaataaatacaaccataggtctggggaaacagtgaaattgtacagcaaccacctagcatgcctgaggctctacattacattaccagtaccagaaaaccaaatttaaaacaaacaagcaaataaaatgatacatattttgataatgagtcaattaaaatacaggaattacctaatctataacccccaatttgttacttttgagtttgacacagcctattttcattgacctcaaaataaataaatgtacaattgaatacacacattcattctaacaaaacttctctttaatctttccttttaaaaactccatcttggttagatgttagattttcattgaaacagttttctctctacatttaaaaaagtgtttagaaagaactcttcattcaaattgcttccaagatctctttctaaaacccaaatttgatcatggtatcattctgtttaaaattcgttagagtaaacaaatgtattgttttgaacagcagctacaacagaaaatttgtcaatagatctcatagcacataaaatttcaaaatcgtcaaatatgccagtctcaatttcagcctaatcacaaattacagacttgcaatttcttgcatttctggaatactagcatagcctccttaattcctctgttttgggggatacacacaaagctagaatgcttgtgacatgcatggtacagcttccttctggccaacaaattagtgtagttcctagacagttaatctaaatggaaaacctttcctgatttcttttcttccctactcaagatctgggtgttacttcacatgtgttcaattcagaccctctccccatcatgactatccaactcaacaaacttaaatatttttgtttgcttgttttagccttgctttccctaactagactgtaggttacctgaagatggcaatatatactcctataccaccattgaattattgctacttaggacaggatctggctcacagatatttgctagtatatatttgataattaaataaagcatggctaatttggatttcatcatagttgcctagggactagtattgaggcttaccttggcttagtgaacctttccccacagttaatgcaaaattaatattataaataagattatacagagaatatttaaacgcttaagagaatgaacttttcaaaacccctcaagtactttataagcatcaatttacatataaataattgatatgctaattataatttagccatatttgttcattaatactgggtccttaaggattctactaggcatggattgaatgacaaaatcatgttaacttagtttgtgtgcctacacatattagagataaattaaaaagcatctccttaaagaatgccctaattcaaataatgttatcaaaattaaaatggccttttcaaatacttaaattaattttgtaagtattgttttacttcactttaggagttcaatacattcttttttccatttttttttactttaattagatacaagatattttacaagtcaatcccagttccctctccctcccctgctcccctactactcccccaactaaaaccctacctatcacataacctttctgccccacagggagggtgaggccttccatagggggtcttcaggatctgtcatatcctttgggatagggcctaggcccaccccgtgtatcttggctcagggagtatccctctatgtggaatgggctcccaaagtccacacctatgatagagttaagtactgatctactactaccggaggccttctggatttctgaggtctcctcactgacacccaggttcctgaggtctgcatcagtcccatgctggtttcccagctatcagtctggatcaatacattcttatttaaaggttcaaaacaaattcacagagggtattggtagagacattttagtttatttcctatccattctgcctatgtattgtttcatgtccaagaactaactatagtgcctagttatatgaatttgtctttcttgaatgctgcaaagctcttcacagtttcatgttcttgaatgtgggactgctttttttctggaatagcctctgctaatgtttcatcatgaatttttccttcaactacaaaattgtacctctgaactcaaagagcatcacaaatttttgtagctacctaacacaattttaatttacattttctctgctgccacaacatttttcaggcatatattcatgtacttgttatataataactatatatttctgtctactccaattcgaaggaggcctttgaatgaaaagattacatctcattttcatctttctattttctagcatctaacgtttgatctggtacaaataaggcatatgtcgtttgggttttttctcctaaaagatatattgacgtcctgactgctggtctgtattcgtatcatcaatcagattttcttctgatgtaatcaagttaagatgaaaccatactggattcagatatatgcaaaacccaatgactgatgtctttatcagaagaaagtgatttggatgcagagaggaaaggtgatcatgtagtgaagaagatagagattagactcatacaaatgcaaatcaagaaatggcaagagttgtcgggaccagcagaaactaggagggaggcagagaatggattgtagtttagagttcccagaaggaccaaactggctgacatcttcacttctcttctcaagtattttaagtttgtggggatatattgcactgattctaaaaagctaaaacagcatccattagcttttattgatagaaaaaataaatggatgacaaataatagaggagatacttttccttagtaaaatatcttagtctgttgaatttagcaaagtgtctttccatgcccaccaagttctgtggtgttcagaatagtggagagttcctttataatcatcttgacatatttttaattacacagtgattctgtctggagggaagggcacagtcttaaaacacatagtagactgtttctaccactgggagcagggcggagttctcaaaggtgcagatgaatgattaaagatcacaaatatccagttaaaacagcttctccattatgggaaactctctttcaaaccatggctagagtactgtcacagtttgaatattaatggtcccacaaaagctaatgtctgaatgtttgctccctagccaatgacactggtttagaaggttatagaacctcaggaggtggggcctagctataacaagtaagtagttagggactgggccttgacgtttagcctgaccccaagattcttttgcttcctgtctactgtcaggacatgatcatttaccttatatatccactgccatggatggagtccagccatcctgccttcctcaccctgatatctcctaaaaccatgagctaaaaagtctctcttctcttaggttatttctgcatgtgtttcatcatactaatgaagaaagttactaactcaagtaatgttctctaccacgggctatatcacaattgagcctttatgcaaatgtgtagaatgtgattgttctaagacttatctaagagtgatttacaacagaaagcacagtgatggacacagtgaatccaaattagaagttacataagattttacttctctagtgatttcattatcatggcctttgctaaacaaacactgccattccttacaatcatataaaaggttgtttacaaaaggctttgacatacagtcttacagaaaattgacataaaatatcttttattcattttttcattaaaaattccttttctaccttactgtctattttctatgctgacactggaattttaagtttttatttgatgtccttctctttatctgtttctaatttccatatgcctttctcccacttgcccatttgtaactttagtctatcatatgcattgcaatggtgcatctgaaaaagtagttcagctatcatctttgtagctggtcctttcttctcatatccctcatttgaaagttgtacaatgaaaaaaaaaaacacaaaatcacaggtaaagtatagtgggaaattaccaatacggaatcaggtagaaatataagggtatttaatagggaaaagccttacttacagagcaacctagccagccagcgtggcagcagtctgtaccgcaagtacaaaagtgaaaccgaaagagaaacgcagtcccatgcaagtatcgctctacatcaccctgaccccgccctcatagcgtggtcaggcacacctttagccagcccctaagtaggtgtggctacagcttcccctacagtaaagagatatggcatttcttaaagttcaccaaatagagtctttcctgaagaatacagttatgctttatagccagtgggcatgcaaccattggtaggtactaaaatcagcaccataaggaagcaacagaattcagtaagatttataattttccttctttccagtgatgggttgaagtcaaaacagaagctgttgagcagtgacacctttaaaggccccaaatatatgtatttatgatgtatacactagaagcagagattgaaatgcgtcaaagacccatataccaatatctgaccagtaagtttcttaaaatagccacaggaaaggcttggcataaagcactttataatagtctgtctgtggacagatcctaacattgactctgagggaccaacagcagccttggtgagagatctctactgggctaatagtgggtctagaattgacccaagtgaaaaagtttgtgggccactgttgagacacaatgcatcatttgcttttatttttgtagtgagtacttaaatgcaatcatggagtttgtgtgaggaattagtctatatagatgtttccttattctttatgaaccccagaaatacatatttatctttgttctatatatgaagaaaatgagagagaaaagtcagatagcttatccaagtcatacatatactaatggcagaggagtcaaatttccaccatcacttctctataatccataatctaaccactattctatagtatctaagttgtccttatgtcagtgtgtgtgtgggtataatctcaatagggatgtgggaccttggccccattctctctctgtctgaatcctggtttattatatgagaccttgctctgatacctgttcctattcttgccatctaccattttaccaacgacaagctatcttttctttgatttgaacttcaaaattatggattgtgtaaatttttctcttttcaagttaaatgtcacaagtattttgtagtagtggcatgaagttgaatagtagggaccttaatgtttcttgcattttctttttaaaattttaaacagtttattttgtatacatgggatgctttgcccgtgcactacatgtgtgcctggtgtccttggaactcaggagagcgtattgcatcttgtgctactggagttacagatggttgtgaataaccaagtgggttccaaaaaccaaaactaggtcctttgcaggagtgacaagtgctcttactgctgagcaatctctctagaccttctcatattttcttaaaatccccttgcctttttcctaataattacttagagaattttaaaatcaggtacagaagagattaataatttgggtaaaatgtcaaaagcttcaatttttcattttagtgcaaactgggttatgctagatttggatattttctctcttgtcctgcctatttctgatttagacaactgctgggtacaggagaaaatcatgattaaaatgtcaattgtgtttgtacttaagggaagctatacaatttgtcattgtttagctataaaaatccttatcaatagaaaatatggaaaaatgtttggcttattggtaattttgtgatgtatgaatggcatccaatgctgatatatttaacaaggaaaaaacaaaatgctatgaaaatgttgtgaatatttaattatcttatttaggatggatcttaattagcatgtattttacagcaatacgtttcacatttttggcacatggtgatgagctgatgcatgtgtacggcacattatataatcacagttagaaacacacccagtgcatgaaatagtggaacagtacacatcctcatttcttattacaaacatggtgtttacgcatagtaaactgtagatctcttcaaatgcatatgttgaagccttgtccccaagcaccttataatgtgactttcaaaaagaaatctttcattacaaacattcttcagcactacagtgaattgtgctttataggaggaacagtgatatgtatatagttagagataatgtgtgccatagcataaaccatcaataatgcagtattaaattttaattagtattttgtgtgtggatatgtgcattgcctgcatatgtgtctgtgctctgggtgagtgcctggtgctcacagagattagaggaggaagccagattctcagggactggagttataggcaagtgtgaagtaccatgtatatgctgggaattgaaatctggtcctctggaagggtgctagtactcttaacacttgagccatttctccagcaccactattaatatttttgaagagcaagggcatgttatttgtatatatttgctcaatatagcattgttattctatttaaggtatgcaaattttacagcagaacagatgggggatatccttttgtatatatgtttctcttattggttgatgaataaaacactgattggtcagtagtcaggcaggaagtacaggtggggctactagatgaggagaattctgggaagaggatacagaccctgagccactagagagacaccatgtacctactgggaagataggatgccaggcattctccgggaagataaggccatgtataaatacatagattaatagttataggttaataattacaagagagctaaccagtaagaagcctaatcattgggcaaaaagtttctaattaatataagcctctgtgtgtttatttgggactaaacctcagtgggaccaagcaggagagaaaactccgactacacagaaccatttcacatttaactaaagatgggtaagagatatggtaactaaatatagcatgtgatctaggactttttcttttgttgtgaaggatattaggataattcatgattttaactaagtctacagattaattttatcaatgttgataaatttacataaaataatgcttatttgaaaaaataaagtatatctacaccaaatctaacacttcattttctgtgatttcctttgatagtcacagtccaaaacaataaataaaaaattccatgaacaaaccattgctaaatcgtaaactgtaatgagtcaaagtaatacagtaaaatctcatgccatctctctccatgcatgttttgaatgttatgttttaatattattcactattgtgaattttttactagactaatttataaatttcttaaaggtaagcatacatgagaagcaaagtagtatgtatatagtgtagtactatagcctatggttttcattcattactggggtctttaaaaacatttccttttaggtaagagaggaatgcataaggcaggaaatttatttagacatccagaaaaagataaccttgtgcatatgtatataaacaaagaaaagatatcaaaatgttaacattttggaaaacaagatgaatggcatctaaaactcgggattatttttatataaatctaaatttcttgaaaatattcagaaatagaataccttatggttgtacatattaggttacttcaaactttataacacacacatacacatgctctagcaagaatattaaaatgtaagttttatatgaaactttaatttctaagatgcatgtgagagtcgattaagcccaaataccaaaagcatttagggaagccagtatattacaaagtggatcacagtaaggtgaacaaaagcaaactgaaacaaagtgcattaacaatcacaaaatggaatggattagaagtgttttaaaattagttttcttctaaaagttagtataaatatttagtcaccatttggctttaaggcacaaagaagttagcaaatttctgaaataatttttttcaaataagaaacaatagaatgtactatttctgttgcagagaagttagttctttgttaggaaacatcttcagtttttgttatgacaaaacccctgcgaaagcctatagagttagagtaatattagtatactaattaaataaacacatattgatgtactcatatgaagataggttatcttaatcgttgacatatcattattttctgagtttttgagacagggtttctctgtctttggaggttgtcctggaactagctcttgtagaccaggctggtctcgaactcacagagatccgcctgcgtctgcctccctagtgctgggatttaagacatgtgccaccaccacccagccctgacagatgattttttacattaaaaagatctatttatttttgtttatgggcatttgcctatttctgtgtatatgtaccatgtgcctgcatagttcctgagaaagctagaagagggcatcagatctcctgtaactagagttccagatgtctgcaagctgtcctctgggtgctcggaactaaatttcggtcctctaaaagaacagtaagtgttcttaaccactaaatcatctctgtcactgcaatgtttgctcttgaaactattgtattctctagtatacagatttttttttttactttcttggactggacagagcatttatagttaagacagtcaaacatttctgaaaaggaagtcttagcttgttctgatgtgccatgtgcctgtgtacacatgacttttacagatgattttaagttatcttgcacagataatgcaggcaaaattacacatgacaaatacatagaaccattcacaggaaataagccaaataatgcactttgttccaaaagcacttcgagcttagacatactgttgttatttaatcccaaatgcccacaatccttgaacattcaattaaattagatgagaaaactgggccatgtcactgagcgatagagccctttcatgattaaaaaaaagcaacatggcttacataactgtcctgacatgtcatccatattaggcaaaggccaactctgctctgcagaatgtatttaaagagtcacaaaattagaactcacaacaaagggtctcctgaaaaatcacaattatatagtattggtcaggtttgtggcaatacaatcagaagagaaggacaaatgctcttaatttatgtagctatatccttgtggatattccttcttcccagaaagaagtgatttctatttgtcatctgtgctgacaatgcttcttataaagggtcaaagaccatctaacaaagaggcatgaaaagccctctttgaaaatgtggtacatttacacagtggagtactactcagcaataaaaacaaaccaaaaactaatgacatcttgaaattcacaggcacatggatggaactaaaccatcctgagtgaggtaacccagacagagaaagacaaacatggtatatactcacttataagtggatattagacatagagcaaaggataaccagcctaaaatctacaatcccagaaaatctgggaaacaaggaggaccctaagagagacatacatggccctgcaagaaggggaaagggacaagatctcttgagtcaattgggagcacagggggactggggtgggaggtaggagaaagaagaggcaccatgaaagcctccaacagaaggagcaaccaaaagtcctacccagctatgatgtctatgaataatcatgacatacaataatatgtaatataataatacagcatgataaccctaagtgtacagtagtggcatgcataccttggtagtaaccaacagctctctaaatggactgtagagccattcagcaagagggaatttatggctgggactggaaagctaggcaactacccagggccataaagtcatggatgttggagaagagcctacagctttcccttttcccaaatcattctaatccctaagtacattcaaaacagttgtcctcatacccacaagtaagtataaacctcactcctcatcaaggaaactactctttgcaacagagatcattacagaaatctacaaccaattgcaattcaggggtgagaagaccagtcccaaaagctgtttctacaacacaactctcatattcaaggctcagggatcactgctgacaagagaacagaaagatagtaagagccagaaaaaacggggagtttgctgtgagatcatgtctcttaggaatttcagaagctacatccataaagtattaccaatatgatttggaaacataagctgaacaagaacaaccacacacatgctaaagtagcttgcagaaagaccacaaagcctcacctctccataactacaggcaactaagaaatgctgaaaacaagggaaatagtctttcccagggaagaacatgcaaattggttatccaatacaaatggtcagccctgaagacctatatacaagataacattatacagaaaggtgtgatctctgtgttcaggtatttagaacatgtggattaactcagccattttgcaggggccactgtaacacttccactgttattggttaggcaagcgcaatacacaataattgatgaataaattaattgccacacatttataaaataatgcaatggttttgtggaagcaaatattggaatgttgcaaacagaaatgaaacatggaattaccaaaatactaacaaagaaagcaccagcattaaagttatttatttaaaagaagccattggtcatcagcatctactctaaatagcagcttaaaggagaggcttaggtagaaatccaagcagcatctatgccaaataggaggcatgctggccatctttttaatagcatttgaagcaaaagatgacagatttgtctgacaactgtcaaatatccacaagtgactatctctctaccacttgtcctatcctatgttaaggaagaaaagccttgcgccatcactgcgctagtgtatcttgtagtcattactcctttgtacatcaaagtctttgtggctaggttgtttttttaaaaaaaattattctctcatatattacatcccaaacacagtttttcatctgttaaaaatatggacatcatgaaattgtaggcaaatgcatggaactagaaaataatcatcctgagggagataaccaagacccagaaagacaaacatagtatgtactagcttataagtgattagtaattgtaaagtaaaagacaatcattctacagcccacagacctagagaggctaagtaacaaggaaaatttaaggggggagtacacaaagatatctctgggaagggggaaatacaatagatttcatggctgttttggttctttcatttctcttttggtagcatgcacagaacactcgtgtatcaaagatgctggaatataggggtgaaggctctttgtaggcaccagattgacttttccatgtttaatgagttgtgtaagtgttgctttcagcaatgggtccttgctgtcagtttgtggaaagcaatctattgtcttggtaacagcctgagttgtttggggattccattgggacccctttggccaataactcaactagatataacccaatcctgtactaagcagagagtgagagaccttcgagcactcagtcttaaatgtgaggtttccatcaaagccctcccctccgattttatagaacctagtagaataaaaggtgcaaagtgtgttaagagacagagggaatgtagaacactatcaaaaaagccctctaaaatcaacatgaccaaagtgcacatgaagtcacagagactgaggcagcatgcacagagcctgcatgtgtctgtacaatgcaggttatagagctaaacagagaagtgaacacattcccccatccctaacccagaagctatctccaactgataaccacttgcaaatgaaactcgactttctcccaaaggagagtcactggggaaacaaaaagactcttaagtgtagactgcataccctgcagtagattgccaacaaacagaaaaggaactcaatggcagctctggaagtttcttgcctctatttgacatctttgggcacttcttttattttttatttttctttttctttttcttttcttctcctctctctctctctctctctctctctctctctctcttctctctcttcttctctcctttctccctcgctctctgattttataggttctttgtgtatacattatgttttcctgtttagtacataaacccctgggtctcttatttcttgtgacttctcttaggccattttacttctgtttgttttgtccaattctgatgtgttagttttgtgttttatttttatcccttagaaacccatctgctttctaatgagagacagaaagggggtaaaataagataggaggggagttggggagaagctgggaggagtagaaggaggagaaactataatcaggatatattgtctgagaaaaatctgtttccaataaattttttaaaaagaaagcaaatgttgaacaaaagaaaggtttaaagttagccagataaaagtgtacacatccagggaggagtctaagctagttatgggtatatctgagctagagagaaagcaatctcttcagttgtcctacaagtttaagtggagatgaaatggacattaacaagatttgcataaacatggagaaaagatagcacttacaagtgttcagatctttctgactggggtccttaagttgagatctcattctgaagtgcaaagtaaaatgttggttgcgctacatgagtgaataacatgcacattcaaaaacttagtacagaaggtagttctggatagaaaataatttggagctgtgtgtctaccaactcctcttcaattacaaagtaagagagtaattcagtgtttggggaaacatgtgcctctgagtaacatacatgaaaacatacaacagaaccacacaaaaagagatacacttgccatcttcctcactgaaaatgtgattataatggttcattccctagtgataggccatctcttacagcagctaaatgcacatgatggaagctgcctaagaataaaaggagtgagtagagagagaaaatccacaaaatttttatgcctatttatcagtgtctctcaactctttatactttcaaaggactttaaatttgagatcagggtacagttatgtgtagtggacactaaactccaagagctacattttattagtgtgataaaagatagcctctctatggcaattatgaatcagtttttctttgatatgaagtacctgtgatctttatcaccaatttagacaacaaaattcaattgagaggatatagggcaggggggggctttaattttagggcaacaatcctacgtaaatctcattcaaatctatttttgttaatgttattgtgcacagatttcttttccctcaatttccagactcaaacatttggattatccatacattaggaatcattagaatttgtgaattttcttgaacttaatgaaaacagatttcccccagtactgcaaaagaactatacccttccattttaatctagttaaaaggggaagagatattaaaaagtaaagaccaagttctaaattcaatctattcttttcttatccattaaggctaagttgaaaattggatatccaatttactaccaagagggtattcaaatatttctgctcaatcccttattgcttctaaattcactcaaaggcaagattattaattctttctgacataaaatcaagatttaatgagtagctgacagcccttaggaattataagaaaatttaatatgatacttttgactaaataatgtgcttttacatatatgagaaacacataatgcaaagtaatggacatgttgatttagctgctaaattctgattgtgattaattttaaaagaatatatattatctatatgcaaaactgtatctatagaaagctcctcttttccaatattttcatctgttgtatacattgtggcagacaatattttcttgtattcatcttcaaatcaacagttattttgagttttgtactaaatgcagggtattttaggccataaaacaaaatgatgcttgcgtttttctgagttcaaactgagtgaactgcaaagaatatataaaattatagtatgattcaaagaaaaattaatgtggagttcaagaggaacaaagagaaataagattgaacttcagggtgagtgaggggaatggtctgtttaatcagacgaaaagtgaacatgaaggcaagcatgtttgcaataagccttgaaaactaaactgcaaagagtgaaaatgatgagtgaaggcatccaggtgggaaaggcaaggtatagtaacagaaaagagcatgattaatctgggtgagataaatagcactgtgtacatgaaagggatagtgagaaatttagataggaaagatctacctaaggtcatgccaataagacactgtatacaaccagaacctgggagcaatctagatgtctctcaactgaagaatgaatggggaaaatgtggtgcatttatacaatggagtactactcaggagaaaaataaacaatggaatcttgaaattcacaggcaaatggatggaactagaagaaaccatcctgagtgaggtaacccagtcacaaaaagacaaacatggtatgtactcactcatacacggatttcagacatagagcaaaggattaccagcctacaatccacagtgctagagaagctaggaaacaaggaggaccctaagagagacatacatggtcccctggagaaggtgaaaggaacaagatctcctgagctaattgggagcatgggggagagggagctagaagaaagagaaggggagaagaggaggtatgaggaggacatgaaggagcaggaaggttgagtcaggggaagaagagaggaaagcaagataagagataccataatagagggagccattataagtctaaagagaaatctgacactagggaaatgtccagagatctacaaggatgatcccaacaaacaatctaagcaataatggagaggctaccttaaatgcccttctctgataatgagattgatgactacctcatatgccatcttagagccttcacccagtagctgatgggagcagaagaagatacccacagctaaacactgagctgaactctggaatccagctgcagagagggaggagtgatgagcaaggggtcaagactaggctggagaaacccacagaaacagctgacctgaacaaggggagctcatggaccccagactggtagctgggaaaccagcataggactgtactagaccccctgaaggaggatgtcagtttggaggtctggttaatctgtggggcctctagtagtacatcagtatttatccgaaatacagtaatggatttgggagcccattccacacagagggttactctctcagcctagacacgggggtgggggagtgggggaggacctaggccctgcttcaaatgacatgacagactttaaaaatcctccatgtaaggcctcaccttccctggggagtaggggaggggagtaggggagggagagggaactgggattgacatgtaaaagaaacttgtttctaatttaaataaaaattactttaaaaagacactgtatacataactaattggtttatagtcaaccacctagtgcttttcttaccaactagattttgacatcctcagggatagagagagtttatatgtgtttgctattcccgtggtagcaagcacactgtcgtagtcagtgttctattgctgtgaacagacagcatgaccaaggcaactcttatgaaagagcatttagttggggctggcttacaatttcagaggtttaatgtattatcattatagtgggggtggaggggcaggcatgggactagagaattagatgagtgctacatcctgatccacaagcaaggagaaagaggaagggggagggagggagagagagaatatgaatatgaatatgaatatgccttgcctctgtgtgagcttttgaaacctccaagcccatcaaccccagtgacacacttcctccaacaaggcttcaccttcccacttcctaaccctttcaacaagttccactccctggtgactaaacattcaaatacatgagcccatgggagccattcttattcaaaccactacacataccatacttggatacacagtaaaagtggaataaaatctcaagaaaatgaagagatgtcaaaattattttttgatgggtcttacttttcccctatattttcttgagcctttctcttaacgcttctttaaaaataaactttaaatggcctgtgcatgatgaggcatgactggccgctaatccaatgattctgcagctgttagagtccaacctagaagaatggctctgctaaactcaaagagtatatacagcaaaagctgttcaagtaatattgttaggtgcattttataggaaaactgacttttagtcagtaaaaatgacatggcttaagtgatttctgtataggttttttgcttttaggtagcctccatagggaaccaacatcaaaactagaattgttgtagaaaaatgaaattgtagcaacacgtatcctgtgcattatttggtttctggtttctagctatataggaaatggtaacaatctataaatcgtgtatagttgagggtaatggcaattgaatcgtattttttggagtcagtctacataatggttaacatggcatataaaataatatgcacttaactatgtgttgcattgattttcatcttctactaactgatttcctgggaagaagacatgttttatatgcttgaatgggacttaaataattcttaaccagtttctctctatccagtcaagagccaattgtttctctgagcattagagggagtgggagcatgttaattgttaacagcttgataggaaagggtacctcttgtgattctgataaattaaataaaatgtgaagtaatctctttctatatcaagggtgagcagttcacttgcaaagaacattcaacaattactacagcaaatcagcaaacaatttacatttaaggttagtaataaataaatcatatggcctctgacccccacaggcatgcggtgcttagtgaatgaacaaaatatacatatttctcattatgagcagttttaagagattaacataagccaagatagctaaaacatgttaaatagaggctctattaagagtacaagaaagtgctggaaacatggtgaaacagtatttgctgaacatgacagggtcactgcacacttgaacacacactgtctgtgactacatatgcatgacctgcacaagattaagccagccaaatctcagcgcagttgggggaggtactcatgaaagcccacgcctcgctgaggaactactggcaactggggtagggatcatcagttttcttcagcgatgaggcccttgaggctactcatgctccaagagatggtctcacaccagtgcacagtagccagcactaaggagtgtcagggtttttgttttgttttgttttttaagagacaacatcaagttgtgagggaaaagttgtgttggggataggtgaggaattggaagggggagagaacagaagtggatttgatcaaaaccgttatatgtatgtatggaattctcaaacaatgaaaaagagattgtacaaatgaattagtctcagactatgctaaattttatatgacattattttatagtacttaaattcggtaacagtagatctggacacatattatgtgagttactcctatctagaaggagaatcaacctttgtggaagactttgaccaacagaatgtagcacaagtgacattgtgggacttttgatccaggcctccagagagcctgtttctatctttttggattcttttgaacactgtgtttgccatgcaactgcttgagtgtccgtcttcttaggctgcaaaatttgatagttgggttgctagcctcaactaagtaatagacatatgacaaatgctatgctaaatctgtccgtgtacaatctgaagactgcaattgtataagtggctttaggtgatagcaaatgctcgaactgtagtcatttatgccattatattttggcaatttgttgtactacggtagctaatggatcttgtctcatagcagttttgcttcttgattcttcattcttcttgatgggggatggccttctgtatgttgtgaattaatgtttctcttattggttggtgaataaatgctgatcggccagtagccaggcaggaaggataggctgagctaccagactatgaatgctgggaagaggaagacaaaaacggatccgccagggaggagccatgtagctgccaaaggagtaacatgctggagcattacaggtaaggcacagccttgtggcaatatatagtttaatagaaatgggttaataattaagagaaatgagccactagccaaacagtttctaatttatataagtctctgtgtgtttattaatagaatcctctgtgtgtatttgggactaaatggctgtgggtccaggtggaacagaaattccggctttacttcctggtctctcttgctacttctttctattgtttatctttgcctctgcatatttaccctgtatttcttggctactaaaaaacttctctactgtcttcttgaacatatatcatacttttgttactgagtataatatatatgattgaaattaatacaataaatttttattcctggatctacaaggacataatcatcactacaaactgtcctagagacagattatgatacctgtggccatatgtcacagatatgtaagagtatatgaaagtgcaatggtctaaaatttcactaagaaagacacatttagaagttttgtttctttagaccatgattacatgtaatgaatcaccttttctgagctgttactaaggatgaagtatagtaagtaatttacaaacaaaccagtaaaccactatagctatgtgtacttatttatacatgatgtgaagatgataaatgtaattcttttcagttcttctttcctgaaattctgggatttagcatttattactaagtaagttctaatatcaacagcaacagcttggggcttgtcatattatgttgagtctaccaaaaagcctgaagcataataaaatggattattaaactagtttgtcaacatgttctaggagacctcatttctcccattgcaatgtggtctcacaccacttatagggtaaaagaaacttgtagtgcccatggtggtcctaaatggtaatttaaacatttgtattttggttcctttttagcagaacatagaaaatacagggtgaacatccttgatttaaaataaaaaagactttgaattggccaaaaaaaaaaaaccagaaaattttcaagtgcctgtggtgatattttgtttgtgctgtaacaaataaagcttgtctgaagatcagagtgaggagccagccacactgtttagccacagaggccaggcagtggtggtacacacctttaatcctagcacttgggagacagaggcagacagatctttctaagtccaaggctaccctgggctatacaagaatgaatcagtctaaaagggaaacagagctcatgactttgatctcagcacttgggatcacatgtctttaatcccagcactagggaggtagagatgggagtgatatggctaggtggaaagaggaatatatatggtgggaggagacaggagctcagagcattcaggctgaggattcatagggataggctggcccctttggtctgaggattcagtagaggaaagaggtctctcttgtggctggctcctttacctctctgacctttcagcatttaccccaatatctgactctgggtttttattattaagacctactagacctacaagtgccagcacagaatcctcatgtgacatgtcacaatcaaaacataagcacactaaaatattgtatgaaattactttcatactgtgcaaatgaggtaggaaacaaaacatcaggagtttcatatttagaactgtgtcctatccctgtgatattttatgatatatataccagatataaatgtccccaaaatctaaaacctgagatttgttgttctaaacattttatataagggacattccatatgtaggtcctctttagaattagacaagtatatttacctctatttttgtgactatgctccctaattatcttcttgtatggggattataaaagagaactaactctacaaagcaatcaacctagatagccttgacatgtgtgcatgcttgcacatgtgcacatatacacatgctcacatacacagagacatgctcaggaaaaaatacacacatgtgtgagtacacattgtacaaaccatatacaaactatgtagaaaaaaagaaaagcactgcttctcagtagatcatctgcttcccatctcaagtatatgatgatatagacatatagaactattcaaattactttgagatatgacaaagaaaatagtgagtcactaaggtggtgcccataatcattagacctaccctgttttcatattgcatgtgatatacaggccagagtaattgtaaagatgacttaagacagcactttagctttcctctgtggtatgaatttggttttccttctccaggcttcagtcatgataccacatttttttcttggtgaaatcataatgatttctctccagtgtacataaagttcaattcatcccaattataacatatttaatgcaaatgtttcagtggcaaagtgctgctcacccaggtgtgtattcaagtgtattggaacccttgctaaatacacttagctctcttcttagcttctagactcatttttttctgtaatttccttagcttcagaaacaaattttgagattgacaagtatagagaggaaatgtcatggtaggttgaggggttaggaggatgagccatttttattataggtacaaagtagtttatctgtctcattcccctgcttatgctcaataactctggtccttgtgtaatgtgctatccttctcgttccctcacacatacatgtcctcaagagagattactgaatatatatccctgttagcaatttgaatgtagtcttaggaacaaatacttaaaagcttgaggttggtgatagcaaactgtacatttaaaatacacaaaaaatctgaaatatcaatcagacttcttaaaactgaaaagcaaaccgggcgttggtggcacacgcctttaatcccagcactggggaggcagaggcaggcagatctctgtgagttccaggccagcctagtctccggagcgagtgtcaggataggctccaaagctacacagagaaaccctgtctcgaaaaaccaaaaaaaaaaaaaaaaaaaaaaaactgaaaaacaaatatgatttcaaatatgccttgcagatactactatttacttaatattaacatgatgaacattaccagaaaattctagttaaaaaaaaaattccgatcacaatctgacatcttattgcaactccttgtaaggagtttccagttggagtttcaattgagtatagttcactgttcaattaaacacactgtcccagttaggatctctactgctgtgaataaacactatggccaaaagtaacttggggaggaaatgtttgtttggcttagactttcatatcactgttcatcattggaagaagtcaggacaggagctcaaacacggcaggaacctggaggcaggagctgattcagaggccatggcggggtgttgcttactaacttactccccatagtttgctcaccctgtgttcttctagaacgcaggaccaccagcccagatgcggtaccatcataatgggctgtcaatcactaattgagaaaatcccctaaggcttgcctacagttcaatcttatggaggcattttctccatgaaggctccctcctctcagatgactataacttatattaagttgacaaaaaactagcaaacacacacacacacacacacacacacacacacacacacacacacacacacacacacacacgcacttctttatgtaggagcagaaaacaggacaaaggtaaataaaataacagaaaattgtgctcattcatgcaaaacttaaattgtaaaatttctcactcggatcctctccatgattcactgtagctcatctatatctattctggatcttgaatggagtgactttgagcaaatatttgctaatgccaacagcatattgagtgtgacaaggataaaagacaagcattgtctttagggatcttaggctcctcgagcagatggataagcagctaatgctgcttaaattaatgcttttggaagacaaaacactttggatctggtagcatttactccctcattttcttcatcgatagatgatcttaaataaatggggatggggcaaacatgaaatctataccataatgtatggatgcaatttcctcatttggtagagacagtataaaaagtaaaaaaaggtataagatttctctaattgaccctttcgttctatgtagctgccccaaacatggtctcaagtcaaaattaacatcaattaaggaaaattatacctctaatgttgaggatcttaattcccattatgcgtgcatgtgtgttacatagtctacatacccatctccaacaaggaagtcttaactcacataccatgcttgctgttttttcttgtggtattgctttacatctcaattattcttccttccccaaatgacagaggctcaaacccatcttaaaactgaatgaatctctagagaattccaaatgtgaagatataaattttctaggatttggttttcaaaaccatcaatacattttaagtcactatcaagaaaagcaaacataggctctattgttttaagtcagaattaatcactcctttttatccattagagaaccttaggccttctgcagaggcctttatgtaaagagatctactccaatcagaattgaaaatactgaaaatttcaggttactatatgtcttactaccattactatagctaagacagaacacggagtggggaggagtggattacctttgattactgacagatacttttggcaactgaacaattttttgataagctacatataaaagtatatggtatttaaaatatttttttatttttcaagtgtgtgcctgagtgcatgtacatgcaggagcctgtggaggtcagaggatatgtctgatcccctggaactggagttacagagggttgtgagctgtcatgtgggtactggaaatcaaactggggtcctctggaagggcagtcagttctcttaggcactgagccatctcttcagccacaacacttaatttctaaattttagttttgattggattacaatcttggttatcaaatacatcgattttatcatcaaaagtttttaaatgcctgtgggcaataaatgtaaaaaacaaaagtaaaactaaacccaagctgattagatactgattaatctcagtagtaccaaagggcagaatgcagaatcctcacaaggagtaaatttctttatttgttatttcagagatggatctacttagatagaaatctaccacaaagggaaagtcaattttgtttatcttcacttttgactttatttgagagggactttctggctagcacagcatccttttcaatttgtttcggtataatgtgcagcagatatgcttgattaatgaactgattagcaactttgttaattatttttccagtggtttttcattatcagagctactgtgaatcttttaagttactcttctttagttgtggcagtccgaaattttaacagtatgttggcttttataaaacaatggtatggacagaaaatatgacaaatattcatttcaaaatagaatcctaagaagatccgtcttatatatcaatcgtatgtatgcttcatttctctaaatgtcataaatatatgggattagggattacaaagcttttatagcattctattactgttacagttatggagaaaaatctcagattttactaacaattcaaaaattttaagccatgttatatatagaattcacagaaatgaaacagctgacaacttagtataaagataaaaaaccaaagtggatattgaaggtgctctttgtgttaatcagtcattgtgaccgtaacaaattacctccaaaactcagtgccttaaagtatgtccacatatctgtctctctgtctatctatggtttttttcaagatagtttctctgtatagctctgaacttgctctgtaggccagcctagtcttgaactcacagagatctgcttgcctctgcctcctgaatactgggattaaaggcatgtgccaccactgctaggccaagtatgtccattcttattttaatctattatgaacctgtgttcaactaaggtgctattttttgccataaggtctatgagcttgcattaaaagttacagcttgggagatgtctcaatggttgaattgcttgccacacaagattgaggacatggaatttggatctccaggacccatgcaagttcttggtagctatatcagatatagataaattagatcacatgtgtgtgtgtgtgtgtgtgtgtgtgtgtgtgtgtgtgtgtgttaataatgctaacatatgttaatatgttactggtatgtataatgctaacaagtcacagttcacaaaaatgctaaatttatttttcattaaaaagtaaaatggctatttatggaggatgctaaacgatgattaaactttttaaagtcaattagtaaaattagggccattgagatggctcagtggataaaggcacttggcatacatgcctgaaggagaaaaccaatgcttcaaaaattttctctgaccttcacatatacactgtggcactcctttccatcattccaatgcagttaaaaacaacaaccacaacaacagacctacaacaacaaaattagggctgttgccatgaacagaagttacctttagcacactaaatttataaaatttgtaataattattaaaatctttcattaaaattctgatgtgatttttgagacatggattctctgtgtaaccacataggcagtcctggaatttactctgtggaccaggatggccttgaattcatagaaatccacctgtttctgcctcctgaatgctaggattaaaggcatgcactactacaacctggcttaatattgatataattttaatgtttcattatgatgtcaaaaatctcctttgtaattccaggacattttttttaaataacaacaaaaaattcagtaacattaataaatatttagtatgatttataaaatgatactcaagtttgaaattttttttggtttttcaagacatggtttctctgtgtagctttggagcctatcctggcactcactctgtagaccaggctggcttagaactcatagagaaccgcctgcctctgcctcccgagtgctaggtttaaaggtgtgcgccaccaatgcctggctcaagtttgaaattttaagtaagaatttgaacaacatgtaaaagtagaaaagaaagaacagaatatataaattagattactaaatgaaggaggtagcagttatagacatgggaaagaaaagaattgaaagctataaagtaaatatatccagaagaaagtaaggtgattgaaaactttagaattgattcattaaagcagttagatgtattttgatgttttacacaagtaatgaaattgtgtctatacttatttgaagtacaattttcttgagaatatatacatagcttagaggagatgtacttatacagctcatcttaattgaattagaatggatatgttgagtggatacaggtcactgtgattccagagaaaaatctcctttgctacaacgctgttaaagggaatcaactgaattctttaaaaaattaccagaataaattattgtttttgttttctgttctaaaagaaattaacataagattactcaaaaccattgtaaagattggttcagaaaagaatcattgagttggcacaaagcaatatatttacatggttttaaagggcctccccatggattgttaattagttggagaggggatatagtccctataaagtggaagtatctagggacaaccttatcatcaccagtgagggacagagagacatagtgtgcttacagacgtgaatccctaaggatggtgtttgcctatgtagtgttctaggtaggaatacatgacaaattaatcatgaaagaaatgcaaattgatatgctgtatatatggtaaccaagcaggttttctatgtttaacaatgtgatgcagtcccacaattcttcttgcttcttgaaaaaataaaattttaagtggattgatggcagactgaaaaggcctacatgtaaatgcaatgcataacactaggctggatgctgtattggaacagtagctataaccggagcacaggcaactgagtaagtgaatgtgttgattactgacagatttcctgaattggccaacttactattattaccctagagactaatcccacacttaggaaatagtcaatgaagtaattaagggcaaagggattcaaaaatataaatgttgtccaatatatagaactaattatatctattcattttctgttatcaacaacataattccactgactagggatattataaaaaaagaagtttacttttgctcatggttttcaaggttcatagtctaaggcttcgtctgctgatggttgacttatgggcagtgaaggcaagacacgtggagcacaagctggggtagctatcctagtatctaacaaattagacttcaaactaaaagagatgaagaagggcatttcatattcatcacaggaaaaatccatcaggaagaagtctcaattctaaacatctatgccccaaatacaaaggcaccaacatttgtaaaagaaacattattaaaactcaaatcacaaataagacctcacacagttatagtgggagacttcaacaccccactctcaccactccacaggaccaccagacagaaacttaacaaagagacaaaggaactaacagaagttatgacccaattgggattaacagacatctatagaattttccatccaaacacaaaagaatataccttcttttcagcatcacatggaaccctctcataaattgaccacatactcaggaacatagcaaacctcaacaggtacaaaaaatggaataaccccctgtgtcttatcagaccaccataccttaaagtcagaattcaaaaacaacacaaattgcagaaaacctaccaactcatagaaattgaacaacatgcaatttcaccattcctgggtcaatgaagaaagaaagaaagaaagaaagaaagaaagaaagaaagaaagaaagaaagaaagaaagaaaagacttcctagaattcaatgaaaatgaagaaacaacatcccctaacttatgggacactttgaaagcagtactaagaggaaagttcatagctctaagtgctcacatgaagaatctagagaacagtcacaccagagagttgaaatcacagctgaaagctctagaacaaacggaagcaaattcaccctggaggagtagactccaggaaataatcaaactgagggcataaatcaataaagttgaaacaaaaaaattcaaagaatcaatgtaacaaacagttggttcttcaagagaatcaacaagatacacaaacctttatccaaactaaccaaaagacacagagagaacatgcaaattaacaaaatcagaaatgaaaagggggacataacagtggacactgaggaaatccagagaatctccaggtcacactttgaaaactgtactccacaaaattggaaaattcaaaggaaatggacaattttctggacagatattacttaccaaaattgaatcaagaagaggaaagcaacttaaacagacctataacctctaaggaaacagaagcagtcgtcaaaagtctcccaaccaaaaaaagcccaggtccaggtggcttcagtgcagaattctaccagaaattctaagaagagataataccagtactcctcaaattgttccacatgatagaagcagaaggttcattgccaaactcttttttaccaggctacaattaccttggtacccaagccacacaaagacacaactaagaaagagaactacagaccaatatccctcatgaacattgattcaaaaatactcaataaaatactggcaaaacaaatccaagaacatatcagaaaaatcatccaccatgatcaagtaggtttcatccctgggatgcagggttggttcaatattcgaaaaatctatcaatgtaatctacatataaaccaactgaagaagaaaaaccacatgatcatctcactagatgctgaaaaagcctttgataaaatccaacacctcttcatgataaaggtcctggagagatcaggaataacaggaacatacctgaacataataaaacaatatacagtaagccaatagccaatcaaactaaatggagagaaactcaaagctattcctctaaaatcaggaacaagacaagggtgtccactctctccatatctctccaatattgtccttgaagttctagctagagcaataagacaacaaaaggagatcaagtggatacaaactggaaaggaagaactcaagctttcactgcttgcagatgatatgatagtctacataagtgaaccaaaaaactctaccagggaactcctacagctggtaacaccttcagcaaagtggcaagatacaagagtaattaaaataaatcagtagccctattatatatggaggataaatgtactgagaaagagatcagagaaacatcaccctttacaattgccacagacaacataaaatactttggggtaatgttaaccaaaaaagtgaaagacctgtatcataagaattttgagtctttaaagaaagtaattaacgaagataccagaaaatggaaggatagcccatcttcttggataggtaggatcaacatagtaaaaacggtaatcttgccagaagcaatctacagattcaatgcaatccccatcaaaattgcatctgtatgtcgattcaattctcttttcaagaccccaggattcagtcctggcacttgaccttattgaacttatctaatcctaatcactttctaaagtcctcacctctaaccataatatgttaactttccattctcgatgcatcacagtggggattaattctcaatgcccaatattttttaggggggaggcaccgatactatagcaaaggtgatcccagtgagaacgtatacaagaatattcactattctcttaccttgtttgaaaatttgtaaagttatttcaaaacaaaacattaagatataacaatgagttttgggaacccagtctagagggcttaccaactaaaataaaagtgactagtcattgaacacagcaggtatcttctatagctcactctactaaaagaaaactgtttgccctctgaacatgtacaaagtctgaggagaggctctacctctggacaaggaagaactggtttcttaacatggggtttatttcattcaaagcaagtagaaagcgtctttatgtgtttaagatggtttctgaagtatgtttgtgatttttacttaggctatagtcacttggtacaattcttcaaacacaatcacaagagagaaatagcccagaattaaaggtgcccatactcttggatttatgtttgtttnnnnnnnnnnnnnnnnnnnnnnnnnnnnnnnnnnnnnnnnnnnnnnnagctgcttgctggcagagtcacttgttttgtttcaaatcggctttctgcccaatgtggggtagaaacctcttttggaggatgacagtgagccacaattcaagttgaaatcagatttagtgacacaactttggcctagactagaatgcaaaacgaagtggagacattttacagctcaccatactgcccctgcattcacttggaaaaaaagtgttccaaagcattgatgccagcttttcagaaatattatagtagtaaaaactgtgacaccagtaatagttgtgccaagcatgggtcttattttagtaagttgtttacctatgccaacattgaagtgtgcttctgtgcaaaaagatgtggataatagttctctttatagaaaaatcaatgtaccccaatagtcataaaatataactgtgtgtacatgtacatgcattgtgcaagtacaaatagatctgcattgtgccagatgtgatctgatcatactggaagttctatttaggtatgtgatattaaaaactgctgaacagaactttttctttagagcaaagccatacatttcacattaccactggcaaattttatttgacatgtaattttaaaatgaagttactctaatctaaagtaatagtgcaacaacacggataagcaatgaagcctttcataggacaaaatggattttaaaattctagagagttttagttacaagtaattagaaacgcaatttagagcacttaaaatgcatttctttcaatggttaattacattataacagccattgtttcaaatagtgatggactaataaattgtaataatcacttctgtaaaaattgaattgcaatgttttaataggcagtttacatgactagagaaacctctttccccaacactggaaatttccttcagtatagaactacttacacagatacatacagatatctgcacataacagattaaatatggcttgctaaacacagtgggccgctgaaaggcattttaattgtgtgtatgctgtgtgtgtcttgtctttaaaaattcaggtggtagaatgggttttaccagaatatctgttacttctaaaaataatcttagctttataaaggtgcggcaggtctgttttcaggctccaaccttctaatctacaaatgtggttcttttttcttttataaataatgagaagacaggataggagagggaaatggcggccatagggagaagacataccagatggaaatgagaatcaaagtaaaatagaacaggaaggaagaggaagagaaggggtgggggttgaggaatagggaatgaagaacagggtaagggggtgagaatgaaggggaaagaggaaaggaaatccccatatttttgaaggctgccaaagtcacttgggtagttcctgtggtcactccgtggtagacagtcctgaccatttgtttctccagtctggagaagacttgactttgctgttcagtcactttctgcttgactagtgtgccatagtacattaagtgagaatgtgtccaacacctaaaggtaaaaactaccaagtgcccaattcattgctctactcctccaaatgtttaggaactgttcccctttaagcactgcactgacaacctcattcgtttttccctcccacaccctgtgagatagctgaaatctctgctgacttctcagtaccatggaccccagatcagcaaatgcaacaaagggaaatttcatgcctcattttcacacagctctctttacttgcgagtttaacttttcaggctttggctggcttggcaactttctgatgccttgaaacagaatttgtcttttatttggattgtgtggatgttctgccaccagttcctacatggttgccaaaagtagaaatgtactctggctatgatacccaccctttactattctctctgggctttctgtcatgtaattgagtcttacatattattttctctgataggaacatttgcctatcaattcatttgtcttgtttcactcctacacatcattcaatatcatttttgtatgctctcagacacatggagtttctgttttaaacacacagagccttattgcaatgttcaagctgttttacaactcttggatacaagggattctcccatctcaacttctaaagaacatggaactacaagtgtgtataacctaaaacagaattaggaaaatttcctgtacatgctattgttagtaggacctccacattaacgtatcacaactcactcccatttcttatttacctttttgtnnnnnnnnnnnnnnnnnnnnnnnnnnnntcaagcaaattagaatagagacaatatgaagttattaaagtattctcagtactgtacttctaagcactcaacgctgcctggaagtgacatttttattgaaagaatggtgggcaataagctggtgaacagcaaacagtattaaatggccggcccagtgttgtgtctttcctctcttcttctttgcatagtaaccactctatcacatctggataatttgagtaagtcaagctacctcatggtttcatactttcctcaagtaaaaatcaatatgaataaaacagaaatgaaaattaccaaattctttccaagaataccaatggaagattccactagtaatgtgaagaaataaaaggttttctatgtttctctgtgaatcaaaatttcacatcttccttgtggcacacaactttaacattttccttactattccatgatctgtcccattctaccagaaaaaagcaaatacatatattctacctcagttaaggcaagcttggtagtttagcctttcctcctgatacaatctctagtacctcaaccaagcctatcaaatttctttcaacttttgtacacacacaccccccaaaacaagaacctacctacttcagatggggttagtttggaatgctaaaatgtatattatttatctgtcatatttgtatatgtcttctctgcaaaattttattttggcaccatgtcaaagtgcctttaacatcctcccttgttttatattgacggttatttggaaactaacctcaattacagtatagtagtcctatagtaaagcaattataagcaaaaaagaaaactaaaattcacaagttttaacattcattgaactatgacagaatatgagtcacttaaagttcactagataaaaaaatgaatccttttttgagaatctgttttctcatactaccactgaaagtgagcatgcaaaattttcttatttgatggtatcctttttgttttattagcagtgcctcagaaatgtttgtccctgattcagtgcagaagtccgtatttcagtgacatgactggcaatctgtgggaagctagctacattgctaaccacatttatagcattgcttctgtgggaaaatgcattctggattccaatcaactaatatccaaaaaactttccctgcttgaataatcaggattcaaatgttaatatgccctacatctccaacaatatgccttataagtcacttgtaagatggggactgtctgtatttgaaaatctcatgctagtctattattcttcactaggaagaaaatcgttggacaatgaggtttcatgcctgaatttttcttcctcattttatattgcatttctccagtctatcaaattagattcatgtaaatcctatcaaaaattctgtcagtacaacagatgctctatttttaatcttttaaaaataattttcgaaatgtaagataccagttaaatattcaggttacagaaacctctcaataattacactaatcatactcttagaatcaagtagatgtattgaggcagatgttttctttccacaattctacttaatgaattttaagtttttcttctgctagcatcaactaccactgtggtgtggcattgcctaccagcattaattagcctaggagcagctgaggagaaaaaagacaatgactacttctgaggttgaggctgcaaagacaggagcaatggaaagatgggtggtaattaatgaaaagtgaccctgagtatagagctgaaatggctgatggcaaatcatagttctatgggaatcaaatggccctgaggtacaaggtggaatgtgatacaggtttagaacatctacacggaaaagcataaggaagatgtgtctgtgtttaaagaaggggtttttagagtacatacataatttagattaccctaaaggggaaaatagtgtagaaagagatgaatgttgggcatggtgacatacgtctgttatccccaaactcttaatgtgagacaagaggtcacaagtttaagacctacctagatgatatagtgagattctgacagcttcctccagagaagaaacacagagagagagggggggcagggagggagggtgagagggagagacagagacagagagagagacagagagacagagagagacagagacagagagagagacagagagacagagagagacagagacagagacaaagagacagagaaacagaaagacaaactcagagaaaggtagagggagacagacagaaacacacacaaataggggggagagagacagaaagatagaaacacatataaataaggaggaagggacagagggaaggatggaggaaaagagagagtggggatggagggagggaggaaaggagaaagagagggagggagggagggagggaggcagggagaaaattcgatttggggtccctggatctaggcagtcaaggaacagcctgagttaaagctcactcctgagggtttgaactgaggaaacagctcttttattctagaggtggagaaggtagtaggaatgctaggcattgctttcttttataaatagcttgaagactggccccctacttccattctcatagattcagcaagaacagattatatcctaagaccccccacaacagtggtattttgttcttcagttggatggggttatttagtattacccttgaaatcagctccatgctcagagtcaccatcatctgtctaatgtatgctctgcatgactgtttcaaggatgtttgtagaggctatgatctgctcaggggaagaagagctttcttagagaaaaccacacactcctgcttgaggtcattcttattaggaaaggtctgacaaggctccactgatactaactcaatctgccattctagagtacaaccatgtgtggatgaacatgaacttctctgcatagtccaaaatatgagatgactgccagagacctggtttttttacattgatcaaggtcgtatttatgcactggaagagcttcaattcctaagcttctttattgcagtcatgggaattaggtccacacacagtggttcatataaagaacccagaatttcttatcaaaaatatttaaaatatagcccagataagaagcattttgtctatctcaagatagtatttgtatcagcaatatcttaacaatgacatcataccaaatgtattgtaatatctgattatatgtgaaatgttaggttacaagactactaccatttttatgtgtaaagtaggaaatacgttattttaatattgcacatcaaatgcaccctttctttgaagtttgttttttttgtttattcatctgtccatttattcaaacatgtctgaaatgcttaagttccaaataacataactaattctgtatctactcagataaataagacatggtgttacctgtgggctcacactgtaacacaaaagacacgtaggggaaaataatccaaacaaacaaaaatcctgaaccagccaaccaaaaataacatacaaaccaacactgaggagtgattgagtcaaataactttaaattttaaggatgggtttattgaaagataataagggggcactctaggcagagacatgaatgaattagagaaaagactggaaactaggaggctgttctgaagattggcacagaagtcttggcagaagaaggtgagatggaattagggggctgtagattttcactgctgtattaaaaagtgaatgggtataacacattaagtgattctcatgggtagcaggaagaacaggggctgaaggtggaaactggtgactagggatattagaaggaactgaaagaatatgaaattgcaacaatgaggagaaataaggaggtatcagaaaaaatagggaaagtgtggttttctagaataatactgacacttaactttgtggagaaacctacaaacgattgggacattcatttacgagtgttcatcacagcactagaaatggccaagctgtacagctcaagcagactaattacgaatatggcaaatactagaaatggttgccagacactttgatgggcaccaggaagtctttaggtacctagaagagttaggtgtctttttctcattaagttgccctttcaggaggaggccccgctaatgaagaaataatcatatgagaatttgaacagaccctaagaatcaaagaaagatggagtaatgacatggggaggggcactatcctatggttttacattaaggcctaattaattctaattaaatccaaaaaaagatttctttatttgtgtgtgtgtatatgtatctgttcaagtatctgtctgtgtttgagcacatgtacgccccccccacacacacacaatagtactaatgtcttagcactgaagtagagaccagaagaaggtgtcaggtgtcctcctgccctctttcatcagtacagcatattcctttgagacagggtctttcctttaacccagcccacatttttttcaactaggctagaagccagcaaagatagagatcctgttgtctttgcctccctcggagttgtggttataggaggaatgcctggtttgttatgtggatgctgctagctgaaattcagtacttaagattgttcaggaagggctcttaaccactgagctatctctccagcacaaaagtctaattaattcttatttttcacataaacactatttgaaattttataaaatacaacatgcaagataaatgttggcgtcaactagggagaactgtaatagtatcaatagcttaaaatatttttaatgtaacttagaaaataaaaacaaccctaacagtataaattggaagtgacagctgctattataagtactattttttaatgagtaaatcttgttttgaaaatgtcctaaattcatttgaacgaataaaattcctcacccctcctcaatttttgcctaaagttgagggtgggtttgacaagagaaattatgttatgacatagcttccacaaagtgaatcctggtagctgtagaagcagaggcagtaatttcccttggcaggcagtattattaacagtgctggcatcttttggctaattggaattccaaaggacaaagataactacttaaataaaataggattatgaactggaattgatacgaatgaaatgttcagtctatttaatcttggtcattatctccggcttgtatctgaggttagttagacttctttcaaatcatttctatacatattagaaaggacaaggattgtagctacgggtcagggacaaagaattcccctgtgaatctctttatttgtagctgctttcaataaccttgtgttggggtaagcatggaactgtaaagagacacaagagaggaaagcattccaattttccaccaatttgattgcaaagttcaacaggcagtaagaacaaaagttttagaagaaaagcctcctcccttgtctctatgttgaaatgaattactgttctccactgaagcccttcgagacaggtatgactcagccatctctgctttctctgggatctccaaaggcatgagagggagcagcaacacttcagataataaagtaggcagaccttgctataacatggtatgagaagctcaaaagccttgtgttctttacttgtgaacaccagtttcatttccttgggctcgtgactgttaacaaaagtccactaaggagactgataacttgtgaacaaaatctccatttctctaaatnnnnnnnnnnnnnnnnnnnnnnnnnnnnnnnnnnnnnnnnnnnnnnnnnnnnnnnnnnnnnnnnnnnnnnnnnnnnnnnnnnnnnnnnnnnnnnnnnnnnnnnnnnnnnnaatatgcttactgttcacaatacagccatagttcccttctcctaaccagagcaagagcaagtcatattaatgaagaatacaaagggtaaaaacaatggcatattttaactcaatattcagtaaaccctagtaacccaattttgctcctctgaaatatggaacttggctaactaaattgctaatgaaagcagtcatgatttttttgagacagggtttttttgtagcctttgatatcctgaaactagttctgtagagcaggctggcctcgaactcacagagatccttcaaattctgcctcctgagtgctgggattaaaaacatgtgctaccaccacccagttgcaggcatggtttttaaccacacgcagtttaaattagagtttagaagtatttgatgactgaatgccacatagacatgttacacagacattttaaaaaagagtctatatactatcaaagatgaattcaagaccacatgaagctcagatttaacacaggcatggatacaaacactctttgggtatacttctaatcctttaaactatgatatttcaggatagagaaaatggagaggtaatcagagaaatgtggttctagtgataattttttaactaaacacatgaaactgcagaaatctgaaatcatcatgaagaacaagtgataatgaaagcaccctggtttatttctataaatttccatgattattgcatctgtatgcaaatagcttatttaggcacatagagttattagttgcaaaatcttacaaagcttcttaattagttctagggttaacattctcagttcacttataatgaaagacagatatacacaatgctggtgctcaataaatacaaggacaattaagattttataacttgctagaagtatctgacaatttccccttctctgaactagggatatagttcacccaactttggagatgtaaaaagtcaagcaatatccatgggggacaaagcagggtaaagagtaggaagaagacaaattccagaatatatatttgtacattttcacctctaacagttttagctcattccacattttataataaggtaccatagattcagtggcttataaaaaaaacaaaaatttatttatttgtggaagctgagaagttcaagtaaagtaccaggagtgttaaatagaggcctgcttcctcacagactataccttcttaccatattgtcatatggtagaaaaggacaaaacctgcactacctccattcctaatgggaacagaaatacaccacagaaagtgttacttaattacatcaaaactgatctcagtcaaggcatccctgccccatggaacaagtgaccatgaagaacattttgttcttgagaataatcctgttctttgtcttctgttctaaactgcattaattttttcagatataggggttatagaacataacacatcttcctttctgattttgctttaacaaagttcagagctaaatttaaagttcaatagtagtaactattcttaatttgcaagttttgagtaactgtctgaaagtcttttataacttttattttcccacttttttgttaacttgatgaaatcttttgggaagatggagaggtgataaatgcacacaggaagaaaaggaagcaggtagcccacctgccaatccacattccttggataaaaggaggcagggaagctatcttgaccctctagaattgaaattggggataattgaaacaatgaaaaaccagctctcacaattaagattttataacttgctagaagtatctgagaatttccccttctctgaactaaggatatagttcacccaactttggagatgtaatcaatgtatattcatgaccggaaaatttcagtagaaataaattaactttgaggaattattatacatatgtatctgtaaagacactgttattatgtgagaaaaactgtaagtgctaactaggagcagaacacagagcacaatacagaagataaaatcagtgtctttaaccactactggtgaactacacggagaaacaaaatcagaatagaaaaataaataatgctaatagtgcagaaaatgaaacactcaaaaactctttgaagttactgagttttagctgagtttttatttcaattattattttcaatcggaaaacatgacaattagaagaaggtctactgattgtggtgatatattgtttatgatttaataacacttgcctggagatcagagtgcaaagcctgccacactatttagccatagactgaggcaggggtggtatatacctttaatcacaggactcaggagacagaggcagatgaatttctgtgagtccaagaccacccagggctacgggagagtgaatcagtctaaaagagtaatagatctcatgcctttaatcccagcactagaaaggtatataaggaagaagcaaaaggtctcatgtgagattcagtttccagtcacagggaagacacgatctccatttcagccttggtagaggtaagatctactggctaactgctttgcttctctgctcttccggcaagctttattaaatcataaacaatatatcaccacaacagacagtaactctatactctattttatataagatcaggtatctaaagccagttcaggtgcgaaagccagttcagactacttcatttttgctttcaatgatatacattgtatgccttacttacaaaaaaattactatctctataacaggaaatagtgtttgtttggtgaatgaatttccaagttcccctttagtctggaacactggagaaaggagggcgaaagagtatgtgcaaagaacaaaagctgtccaatgagctgtagaaaaataaacagcaaataagttatctgacaaatactgatagatgggaatcttagcctgtgtttgaataatagcccctgttgaaaactataggcttcctttccaatcatgaccacaagtggatctcatgttcatgggtatactgagggatgctggactagtatttctttacactttacattttaaagccacttaacatgttttacagaagatataacatctagcctgagaacacaaaatttggcagagctgtcttctagcccattattgcagccatagtggactcataatacatctattacttgtttcagggaggctacccacgaatgctatttttagaacagagatgttataggtgtaagcagagggatgactaagataacactacaataaatctctttggaacataagagacttctgattgggggcatccctctttcagtttatgaggtctgggaaaaactacttacatttactgggtataagtaaggagcatatgtatatcgctgaaggcaaaaatgaatgtggcctggcctggatttaccacctgaaactgcatcattcaaaattggaacttatgatgtttaattctttttataggtattgggtattagatagccagctctcaattatccaggctaatggagaggaacagtctcatggctaataataaatagcaaataatccagacattatttgtgtagatttggaaagacactttaaaatcagaacgtaacttggaggtctgagtcactatccaggaagatcagacattgagccagcatcaggggtcttgaggtccagagcacactcactctaagaattctcaaatcattatttgtcctcctcctggaaggcatgcagctattttctcagctagagagaaaaagcttaagaattggaagggcagaagggccctggaggactgtagcaaaacaagtgtctgatttcgtattttctcactggggagtttccctggttacttagactgaagttgccttcacttgtgttctaatccacggagacgtccatggtgtgcaaaaccacccagactaaatggaaaccactgagaagaaaacattgtatatggacttgaaaactactgaaaggacagagaactctgcatcatgttttctagtaggggttaataaaatgtcaagcctttgtcagggttctgtaccatttctatttttctgtatgttcttcctacagcaattccagttttagcactacatgtaaacaatgctactgagtttagatctgtgtgagaaaaaaaaatgagtctttaaaataatggccagctggtgacatcatcgctcaggaggctgaggcaggaagatgaagagtcagagccacttctgagctacagcgagtttaccccacctccaaactgtacataaaatgcatgggaaaaagcacttgagagtgtatgtcattgtgcatgttattgcagttcttcttattaaaaatgagagactaaatagaaagaaatacagtaaaatcactcactgggtactagaatctatgccaggctccatggcagtgagttggactttttatccatttacagtttaagacaaacttgatggtgctcgagccacaaggttctcacttatatgatttgccatacagtatttcattccagggccagcaggcattggccccacacatatgccattcattttcagcaccacttgaatttgcaggtgagcagttttattttcagagagttccactactagagctaacatcttgtttactgtgtaagagacacctattccagggtctgatgtgcatcagccttgggaggtctaactctgcatttggctctatataacatgattttgtagttctgacaccagccatatgttcaagctccgaaaaaattatattttttcctgcagggcttcctttaataaaaacagggctggaggaatgcagagatgatgtttgtaaatagatttttaaaaatcataaggcatattggattctgagaaattccaggaatatgcctcagtgaagtcctagctgctcagtgtgttaagcttctcagatgaaatcaataagcttcaggttatattagcaatacattttaatactaattttattaaaatgttgttgctcctcttaatttccttgcatacagtttgtctttaaagctggaagaaacaatcatcagtttgtccaaaagaaaaaaaaaaaacaaaccaaacaacaaaaaaacaaacccatgcattcagcctccctcctgcattgggccacatcagtgacatttaggcttataggctaaagagaaacccacaaacaccaccttgcagcaacatacacaatctgaattgttcatctttattttttctgaataatttttttggcttttgagaaagggtttctctgtgtagcttcatagggtggtgcagtgatggcacacacttttaatatcagctcttgggaggcagaggcaggtagatctttgtgagttcatggccagcctggtctacaaagctacacagataattttttcaaaggaaaacagcatcattacaagctctagaacatactgttgtaaaatgtcaacaggatgcaactttcttctgtgtgaccaaagtgaatgggcaaatttagcacattcaagagccccacaatgattctgtaaaacctcgaaggaccaaggcaagatgtggatgaatgaggatcatagtaggaaccatgttggaaaaaatttttttaaataaaagatgcagtgctgtgcctaatggccctggcctgtaatcctagccactttggagattcatgtaggagcattgtaaactgaatgcctgtaatggtgaaaaggcaagttaaatgtcaaaccagacagcttagtaaggaaaaaatatccttatctctgaagacacgaggtcaatgaaaataatccgcacaaataggccctgcccagaagtcctacttagtattattacttttgtccaaccatatatttccacaatgaacttcttatccaacacaggtttttgttctttggatgtatgaagtctactatatcaagtaaaacttagaattattaaatacattagtgtgcttttattaatttatgttttggtaaagcatccaagctatgagaccaccatgcagaaaagaatttctgcctaagatataggaggaaagcatttgaaccgggatgatggaagactgctttgctcaaatacaagttctgtgctaaagttagactaaaaatatatattgctttttcattgttatctaactttgtcacatcctccaaagggaatctctgtaaattgtaaagtttgataagtatgagctatctacctgagttcacaaaactaagccatggttttagatgatatggctttctaatgtaaagatttcatatgtattaaccccaggtaggagaggatgtttgtaggagcaagaagtgcaattcaagggacagcacacgtggagttgcttatgtttcacagaattctttaaagtgaaattcaggcaggtctattaaaatttctgtctgttctctacactagataagtaatctcattagttttggcaaaggtcaagaaacagaggaaatccatgcatacagtagtaacatgtctcagattctttcatttataattaagagactgtaactgcatgttaaagcttcattttgtcaactctaaacctatgcacggaatgaggaatgagcagcaattagattagcagcagtatgctagctacaacaggaagtgtattggagagtcatcggaagtagaacagtttcagtttaaaagggccttgttgcttcacagttcagaagcactgcagagctttggaatgtgctaagtttgcccattcactggagtcacacagaagaaagttgcatcctgctgtcattttataaacatttgctctatagctaaaagaagcaaactatttagaaatgcccaaagcctatcttgatgctgtttttttaaggactttaaaaataaaaagtcatgttatatttctttttggaccaaataactaatctgcttctatttttgaatgccaaaaagctagaacagtgtaagaaacccacttggtggtgaggaggccttatagaaagtgttagagcagaacactgatttgggtgggagcactgccatggagatcatagttcaatttatccctatcatctacggctcgttgaatcccacccctttcatttcttgtttccttaaaatctgccctgtctttccctcccctcttccactaacccatagtatcaaatgaccaactttaaagggttgtgtgctccatgaattaagtgcatgccctgcttagctattataatgttacccaattctgagtttaatgcaaaaagttatctttgaaagcaatgaaaaaggattacacctgaaatcaagcttcccaatggagaagtagaggagggacacattcatttattccttcaactgctctacacataaaatgatctctcttttaaaaaatgaattatttttatttgcattggtattttgcctgcatgtatgtctgtgtgagggtgtcatatcttgaagttaaagacaattatgagctgccatgtgggtgatggaaattgaaccatggtcctctggaagagcagtcagtgttcttaagtgctgagccatccatctctccagtccctaaaatgatgtcttattaaatgagtattactttgaaaaaatgcatagaatcaaaagtatttaagattactatttataaggatagataatcaggaccttataacaaataaaagttctttaagatgaaatattattattaaatatcaggggacgagtaagtagtattataagttttactccaaaaggtcatttaagagtctaagtaaaagattctttaatataagcatgtaacagcaattgatgtaaaaagaggccatgaactgagagagagcagggaagaaaggaagggatatatgatgcaattatattacaatctcaaaaaataaatgaaaaaattaaaaatttttgtactattaaattttatgcaaaatcatggcagtatcacgcaatattgaaatacgaattctatttatgactcattaatctaaaatacttgttgagaatgtgttatatgaggatgtgtggaaataactaagatgtatacttattctgtaaatacactgtacaaataaaatgtttactaacattacaacaaaggtcacgaaccctcttctaaaagcaaaaaacaaaaaaacacaagacagcgaatattttaggcaagcaagacagcgaatattttaggcaagagagccacaaatgttatttgttgaatattcttgattaagcacttatctttttatatgtctgaatgttacgaagaacattcctaggtctagtctgagtgcagtgactatagtttcttaactggtgatacactttatggtctagcacaaacatgagcacactgaatttgagttaagaaaagcaagtgtattcaaccagctgatctacatgtctgtattgaaaaggaatatgaaaacaaaaaagacagtatgattgatatcttcgaagaattgaaccataaggaacagacacaagtgaagaacagtatatgaagaatgaatggtaggctggagagatggctcagctgttaaaggctaggctcacaaccaaaaatagaagaatgaacggtagggttaagacatagaggaggaaagttggtgcccacaaagaaaatgatatttgcacaggtcttttaatgaaaaggagatcaaaagacttctttgtggaaatcaggtaattttggaactcatggatgaaatatgtagtcttctatacctataagaatccataaaccatgaaagaattatagcacatgctgaagcaacaattttaattctttttaactcagcatctaaaacagccaccggaaattctgaagcattgtgctgaaaattaacatgatgatgaattcatttttgtaacatacaaatgtcactatcaatgaaatgagggaagtaaagtattggaagcgtgacaaatctttgaaggctggttaactacagtcaaagtgatgctattaacaacaacaacaaaagagttgggagagacaaagaaccaaatagactcagcaattcattgaaagtctgataaacaggaaggacagagagaaatctgagggaaacttaaccttggaatttttatgcaaattaacatttttaagtatcaggtgtggagttggctttatactactgctcatttagattacaacaaattcagaagatttttaaaaaagaaacaactgtaattttgtggatatatttgaatgtgctaggattgatgagtgaagcaaagcattcaacctcatttgctgaatgatacttcagtgattgctatggcaggactgatgtttctgcattaaattctgcaaatgttcattctttgcaggacatcaaagtggattaaaaaaacacaatgaggatattgcctctatggctaacaactccatgatgtgcatttctgttgtgaggtatttgactacaccatgtaaagatacatcatcataattggtttaataaaaagctaaatggtcaatagctagtcaagaggtataggtgggacttttggacagagagagctctgagaagaagaaagggggagtcaccagatggatgtagaggaaacagggcatgcgggagaagcagtaaaagccatgagccacatgacagcatgtgcattaagagaaaccggttaatttaaattacgagcttgttagaaacaagcctaagctaaggccgagctttcataaattaacaagaagtctctatgtcattatttgggagctggtggaacaggcaacgattccttacacatttctatgaaaggagttgttcaatttttgttttccttcagtctgaggctaatctgcacaattgatgatgcttgtaatcctactcaaacagcagctgtctttgctactgtggaccctgagtgttggatttccccctctccatctcatatgatgatgaatgcccttttgttgcttccttctccctgtggagagtcaatactgtcagcagcatggcctaacatgactagtgtcataccccataatgataactattccaaagcatacatgacacagaaaagaaagggcagcagcagccacagaagtggcttactttgcaatgtacaaatcaagaattctttgatttgaaacacatccttgctcacagatgtctgagtttattataagcatgatcactttgtactctatcttccagatttccaattaagaaagatttttatggaaagcattttctcatattagactgattttgagccacagttctgacctgtttattatagtcatattgcctttacatgtgatacattttctaatatatcaacatgtctgttagtgattcattcttttagaagcaggtaaaaattgaatttcagttgtaagaaagaatgtggtggtctccacatgtcctctagtaacatgaagatatcccaaacttccaattgttgcatgttttactattactcagtttgttggggccaggggtggggacaaacaagcatgcacgggatttagatttctcttttccatttcacctggcatcacttctaacacagaaattgaccaagtaatagtcaattaggttgactgctgtcactgtacatgtgaaagaaacagtaagtatgggaactgcctcccaaaggcagctgcagtaggcaatgacttatttattacagagatttgtgtgcatgcaagaaaacagatctaggatgcttgcctgacagctgacttttatgaaaaggacattcgagagtgatgacactataaacttcctttgctactgtcccaataaataaataaatgaatagatagataaataaatggacctgtaaaggaacagaagttaaaatagtctatttacatgacacattttttcacaagtgttattggcttgagatggccaacaatcaggcagattaccccaaaattataacagactatattttatacatttttttaaaacagagtcaagaccaatcagaaattccaaaaaatcctaaaagacaaaacatctagaagacaagataaattatccagaagataagttggacaacaatctttctcaattcagtaaagcatttactaagtggcctaagatgcattcaacgattactatttgaactactttaagtgtattcattttccaagaatctagatataaaatacagtaaaactaccctgaatataagagaggtatatagtgttggttcaaaagacacttctgatcatcacactcttaaggtcattgttagatatgccagccatcattctgctgcagctatggaaatatgctggataacagatagttcttacatttcaggtgaagctacctaacagaggtgtcttatttattttgctaagagacattttgaaccagatttagtccataaaattagacttattacattttactttctttttccttaaaatggtattttgctaattgaaattttttattttatttttattttatgtgactgagtgtcttgcctgcatgtatgtaattatcccatgtgaatgtatgcttggtgcatacagaggccataagagagatcccctggaactggaattacagacgattgtaagccatgatgttgatgttgggaactcaacctgagtcctctgaagagcagaaaatgcacttaatcactgaaccatcttagtctcattttcgggttaatttttaaactttttctttttaaggatttctttcattactgtcttgggtttcctctattttctttctcatctgtatttttttatacctccatttgcatgtttttcctttcagtctgtccttcatcacaacagtaacaacaaaagcaataacacaatttccttctttttaagggaataagatatagttcgttttagagacattttaaataatcaaggctatatagaacagacttacattaaccaaaattccatattccaagatggaaacagtttcataaagctttatatttttaaagagcacagaaagtaataaatcaatgcaagtttaaaatacatttgtcagtacattagagaggaatgttcagagacaggggatacgtttttataggctcaagatgctagctgatgacattcttagcttttggatcagtggaaacttctggaatggtttgttaatggatacctaaggattttatctattagacagaagatgttattcccaacagagaggtgggcaaggagtccctttttaggggctaaagctattccaagataaggtgactagccctgggacctgcaacatttcacctttccacagtgctaaaattgtaatcagtcactcactctctgcagacacagttttgttccagcagtcgtcattcacagttctccctactgaccaagcattatatcttgtgcatgcaggggccacatattatttattaaacactacaaggtctctcatagctaagggggctcaattttaggatctcaggtagaagaggccaagtagtgggcattgtcctttaatttctttattgattccacaagcactctatctatggtttgtttttcttatttagattatttttttctgttaacttcttaaatcgctgctttcatcattatagtagataacaaaaagaaggcctaaatatgttcatatttaccattacctgaaatatagactagaaagtaagaaacctgagttctagtccctactgtcattagcttgcttatggtttccagtaaatgactgaaccctcccttaagcctggttttcatacataaaaggaagaacttgcatctgaagacctctaatagtcctttgtctctactaatcctcaacttcgacttgtcagacactatataggacaacaattatgtatgtcaatttgagtacacacaaaccgtactgtagaccttggattgtaagttgatcctattagtccataatatactaacttgttattattcctctactccagggtgttaggagtgtttctactcacagtctaaattttcaaggaaagagacaatttcttattgatctcagtatctctaataattactgcagttcttggaacttcttacatctattacataaactactcaatatcaatggatttctgccatcttagttaccaacaaagtctagtttcctgaatatgacagttttctgagaaaatggacagactgatgggaacaatactaactcaggacaagatcagacttactcataagggaatcaatatttacctcctaaaaaatttactagaacttactgctataattttatgtaaaaatgtactaactgcttatgtgatatcaatttcttttcctgtggaaaattgtgacacttggcgtacaaggtttgaaaaaaagacaatttctggagacatgaaaagaaagttacagaaatgataaaaattctaataacacatttccacccctagattccagaagaataaaaattactgctgtgacttacatttgcccctaactataagattttagttaaggggctctattaaaagaagttctcagagtcataggctgatcttgtaaagagcaaagagaaaatctccagacccattatagacctccaattaaaatactggtatttgtcttggccactttatttaaggagtatgcattctctgcatcttagattttatatttcaaacacttaatgatgattaattgtaaaggacacatgtaagagtagaatgtagctaaatgatgcatttgtaattcatgtgaaacaacataattagttctccaagggttcatcaatatattattctactaaacagaatacttgaaagtcccacttgagttttaaatgcaatatgaagcctttattttaagcatggcttcctctgtgtaatattctcataattattttccagcaacatgaaatattaggttgattatttttattctagctgttagcccctcatgctgtgaagaaagaaacttcatgaattcattcattcatttcaagacaaaactgaaatatttgggagtcataattaaaataagaaaatggggaaaagatcggatttcaaaataattatgggttagtaagttgaaggaaaataactaagttagtagtctatatttactaaaaggcaaaaatattcttgttgtctctaccgcaaatgtaaacaatatataaataaacagaagttagttttatgtaccaatttcgactcatggaaatgaattacaatcttctaatctacactgacatttttgtatatgctgtttaaaaaagccatattcctcattttgatatatgtcggtatgcagaagacaaactcctctttactctggatattatataaaaataatgtcattacatatttgttaaaattctctgattagttaatgagaaccatatagctgatgtatttttacaaatattttacacctgtctttagaaattgtacaacttggaatctatacagtgctgcttatactacagttgaaccaaatgatttgcttttgttaggcaagcattcctcctctgaactctagccttgaactacatagggcttttgataaaaggttggttaaggtcatttatctcccacctcttcttctgacttttggtaatataattttcatacgcttctgtctgtttttagaaaatacatgacctcaaagaatagtttacatttctgtgccatgccctgacaatgtggcaagtcctctaaaaagagaacttcaattggcaagaattatgccactggggatatacatgtaagatttctatccctgatgttgggatttgggaaaggatgacagggtgagagtatctgctaaactactctcaataacagacaatactcactcttagcatgaatcattttcatttagaaaatacaaggttgtaagaagaaaagaaaggaacatgcaactgaatccacaatgagaaggcaaagtgaatacctgatgtatctgtgcagaagtgggggaggaagatttaagaacatatttaagaatatatgttcaagtagtcccaaaattcacctacatgcaaagtgacaatgtatttataaaagaaccatatcaccatatatccaactgaagtcatttaaataagtaaataaaccatttcagaatgctacttttctgaacctttacaaaaaaaacaataaagtgtcattgaatggttgctgtgaaatcagagagtatgtcagtctacactatgtataacagctgtacttctattttgttaacacaaataatgagcagaaaagtactatgtaagaggagaaccttttcttagttaggctctttcttaggatatacaaactttggaaaaaatcagtctgccttgctaagtgagataacaacaaagctagggattggaattccctactctagaacacaatggaaagtttgtaccaattagcctcagaaactgaactggcctccttctgaaattccccttagaaagtgtctggcaaaatggcacatataagtagacatttatgtatcttttcttttcttttttttttgtttgtttttttgagacagagtttctctgtggctttggaggctgtcttggaactagctctgcagaccaggctggtttcaaactcacagagatctgcctgcctctacctcccgagtgctgggattaaaggcatgcgccaccggcatttattcatttcaatgagtcaaatttccccttccttaagagttacccccatggagggccttacccttcctagggagcagaggggggatgaggtgggtgggctggtggggttttagggggaggggagggacagggagaagggattgacatgtgaagaaggcttgtttctaatttgaactaataaaaaaataatttcttggggggggggggggggggggttcaaagaaatatccttgaggctgagcagagaccacactagttttgagggatataggaaagggttagatatcattctcagatagaaaaacaatgggcttcaggagaccaacttgaaagtcaaattatctatgttggactataatagctgtgggaatatatgaatggcaagtacctaaagattcaaatctaattaattaatttatcaattagtgtgtgtgcacatggatgtgtatgggtcacagtgcatgtgtggatggcatgtgtggtggtcacaagacaacttgcaggtgacaggtctttcctataagtatctttgcccactgagtcaatgcaggccccaacaacaattcaaaacacactacataagaaatctttttttttaagctatcactcatttttgcagtgactgggattccaaaccagggctttgtgaactatgagaaagtaccctatccctgggctataccatcagcctttaccaataatttttatacaacatagtaacaacagataaaatgagtattcactggaaacctctgagttgtggtcctaacaaatagctgccttatggtatcacagtttgcatatgaagcttcttctgaagcttcttcatgtattgaaagcattgtaacttgctggtgacactatttttggaggtcctggaaactttgagaaataggtcactgtcggttggaggtggagaatctgaggactgtatattgacctagctcctctctgtgtctgcccttcctgtttgccatgagatgagcagctactgctatatgctcccaccatcatgatgttcagccttctcacagcagctaaagactatggaatgaaaagttggaaactttgaaatctttactcccttacactattttcctcatgtatttgatcacaaagctgtaaagctaactaacctgatgttcctcagatcactggaagttgctctctgaaacagtaccatggccagccagtaggagggagagcaagagaaatttggtaagaacagtttgtgatgtcaattacatgacagcataggagaggcagtaggaaaacatacttattcgtgcttctggttaaaggtatattattcttctaataacaaaagaaaagtcaacacctagagattattcatttttgcctcataattagaccttaggtatccttcagagcctaagaatcaaaacatttcacttaattttcaaaatggcattccatcagaaatttagccaatatagaagtaataacaaggtatgttagagaagaaaacatgtagccaaacagttcccaggtgctagaatcatgagaaacagaactctaacaaaccattatgagaatgcttcactactttggatcagttagacatatctctgatgtacattggcttctgcattggtgaccaatcccttccccacttttaggcaaatacatgcttttctattctgtagacggtaccttttgacctctcatattagtaacccaattgctaatctacagcatttacccaatttgggaattttctctgggaaactgcttggcgcactttgagcctccgaaatctcagaaagatgacagacatattaatgtaaaaaggagagcagtgagttcattctttgggaagaaaatataaataactaaacatattgaataataaaaccagggcagccgaaccaccctgatggcaaagcaacaagagcagaggaaggtatgacagacatatgctcttgaagcatgatcacagatgtgtggttattgtttcaccaccagtggcttaaagacttccagtgcccatgttgtaagtggaacattctagtttggataaaaatggctgaaaaaatattgcaagagttctttcttaaccccacacccactaagaaacgctcatagctcatattggcctttgttctttgaaaatagaaaaacatcttttatacaatactaagcatctaaaacaaatcaaaagacaggatacaaagacaatactataaagaagatgatgaaagctccaaagtggttaatatggattatttcaaatgcttcagagagacagaagcatacaggaaccaggtcagagatcaagagcagagtccattcagtttctactttgtaatttctgaaagattatcaccagagatgataacttctcaggaataatatgttgttgaactcagaccaaatcctaaatcatccttagctataatactcaggggatgccgtactcagtttaattgccttcctccctttggacaaatcaatccaccctttctttcagtcaacaaatctcacaattttccatcttctttgaatgaattcagccaaaccaccgctggatagggtattgtttatatatccagcatgccagagatgggtaaactataatttaaagttgtagttttctgtgcagtttagaatttttaaatatgaataaagtattaggcctttaattttcaattatagaatatatgactcaattattttctaaggaaacattataatcaagaacttttcctaattaagttctaaggaattacttacccatggaggtaccaatttgtgcaagggttttacaagagaattaatctcattgtatcatatcttgtgaggataggaaactaaaacatagtatttatttatttctttttaaatacacgagtgagtttaagactgaaaaacagtagtaacacaagtcaaatttgtgttactcttcatctctataaaggtataatcctcctaccacttgtagtatctgcattctaccagtagcagcctggaatggtttctaccacgtaaatgcaatggtttatttatgtttctctggttctcagagggacagttcttgtttcctttaggtgtctttgttgctgtttctatggttcattgatacagagtgagcagtgatttacctatattttggctatttaacaggcaatgaattccaaatgtattggtctgataccatggcttagttacttattttttcctcgagaaaatagaaagatcaagatgtgtatctgtcattgggagtggttgctggctatcaaatctaagaattatgcatgcatagcacattcttcaccacaagaattgttttgaaaaccacaaagtttttatcagccctttcttctttagtcttctctcttattgctttgaatatatttcaaattttaaaatctaagattttattttctatcacatttattggtaaaacttaatatgttgttgtaagaattacagactgtcatcctatagccctaaaaggagtatttgttttttatattcggtcccaaactgtcatcacggaatcctgtcaatttcctaggtaccatttaaggtatgcccatttttttatttactttttactgtaatattgatggggagagggggaattccagatggccttttataaattagtcattcaaagagagaggccgacatttactcatataactcacataagaaaaagaaagttcccatttaaataacagtttgctgatgtcaacaaaatggtgacatagaaagccccaagcctagtccctgcctagaaaaaaattaataatatatcagcaaaacaacccatcttactgagaggaccaaaatgtagttacagtaatccagacgagcacaaaaccacaaacaattgtgttaaaccggtaaaaaaaaaaaatcttaaatttacctgtcagacaatcccccaaaccatcataactcagtactgaaatgtttccctatgtgtaagagaacaggaaacatgactacaactcactggccatttgctatactgaatgaagggtgtgtttctgtcttgtctcacatggagcacacagatgattatagctcaaatgtttggacttttaaaagggaatgaaagaaggacagctgcttactgtgttgatcatgagccttgaagactgaaggaaggtaccagagctgtgaataatcaaacagaatgtagagagagaagcagaacagacctccaccaactggctggtctgggctactacctgaggggttaattatgtctcacttcagatggagcactgagggaactggcatagctggatgggagacgataaaaaggaaggaaatggagctgcagtttttctgaaactagcattgccatacagcgggagaagtaggcagccaactcaaggtttctccacattggaagagaaaactcggaagatatgtgcttaaatagcctgcctccaaattccctatgactgagctacaccctgagttctaaacatatcatgcagcatctctaggatgtaaagatagtacaaaacacaccaaatgattcctgagagactgcccattaatagaaagaataaaaattacatgatcatcaagagaaagcattgataaaattcacaagaaggactctcaacaaactatatgtagaaggagttcacctcaccattaaaaaaggctatacataaaaagccctcatcaaaaccatatgcagtatggaaaactgagagcttttctcatcttgggaaaaaaaggcaaagatgcccatttccaaccctgactctcctgagatcgctgtgctattccggcccccaagcatgcagaggcaaattgaattgtcccctgagaaccaagcaacccagagtctactgacatctgtgccctagtcctgctcttgcctacctggagagcaagtgcctcagacacacctgcacacaccatcagacccatcagagtatcagagacaattgcacccacctgaagagaaccccagacccatacacaccaggaaaggaagagacaccacctgcacccactggaagaagagatgggaagacgacaatataagaacacatccaacaacaggaaaaccaatatgacaccaccagaatctagggactctacagcagcaagacctgaatatctcagttaaacagctgaaggaaacagttcaggacctgaaaaccgaaatagagacaataaagaaaacacaaactgagcgaatgctggaagtagaaaggctgagtaaacaatcaggaaccacagatgcaagcataaccaacagaatacaagagatggaagacagaatctcagacactgaagttaaactaaaggaaataaattcattaagcaaagaaaatcttaaatccagcaaatccttaacacaaaatatccaggaaaatatggacatccttgaaaagaccaaacctaaggaaaatagttatagaagaaggtgaagaaacccaactcaaaggtgcagaaaacatagtcaacaaaatcatagaagaaaactttaacaacctaaagaaagacgtgccactgaaagtacaagaatcctacagaacgccaaatagagtggaccacaaaagaaagtccccttgtcacataataattagaagaccaaatcctacagaataaagaaataatattaagagcagaaaaggaaaaaggccaagtaacatatgaatggaaaaaaaaagatattccacaacaaaaccagatttaaacaatatgcaaccactaatccagccctacagaaagtactggaaggaaaaccaaacctaaggaaattacactcacaaaagcataggcaattgataatcccactttacaaaaacccaaaagaaaagcagggtaaatccatatacaatatcactaccaacaataaatctaaaacacacaagaataaacactcaatggacctcaatttccctcaatattaatggtcttaactcgcatataaaaagacacaggctaacagattagatacaaagacagaatcgatccatctgctacatacaagaaacacctcaaattcaaagacagacattaccacagagtaaagtgttgggataagatacttcaatcaaatggacccaagaaacgagctgtggtagctatcctagtatcgaacaagttagacttcaagctaaaatcaatgaaaagagatgaagaaggtcatttcatattcatcacaggaaaaatccatcagaagaagtctcaattctaaacatttatgtcccaaatacaaaggcaccaacattcataaaagaaacattattaaaaatcaaatcacaaataagaccgtacacagttatactggaagatttcaacaccccactctcacaactccacaggaccaccagacagaaatttaacaaaaacacacaaaggaactaacagaagttatgacccaattgggattaacagacatctattgaactttccatccaaacacaaaaaatgtaccttcttttcagcatcacatggaaccttctcaaaaatcaaccacatactcagaaacagcaaacctcaacaggtacaaaaaaatcagaataacgtcctgtgtcttatcagaccaccatgctttaaatttagaattcaaaaacaacaccaattgaagaaaacctgccaactcatggaaattgaacaacacgcaatttcaccattcctgggtcaaggaagaaataaaggaagaaattaaagacttcctacaattcaatgaaaatgaagacacaatataccccaacttatggggcactttgaaagcagtactaagaggaaagttcatagctcttaagtcctcacatgaagaaactagagaatagtcacaccagagagttaacatcacagctgaaaattctagaacaaacagaagaaaggaggggtagatgccaggaaaaaatcaaactgagggcagaaatcaataaagttgaaacaaagaaaacaattcaaagaatcaatataacaaagagttggttcttcaagagaatcaacaagatagacacacctttatccaaactaaccaaaaggcagagagaggacatgcaaattaacaaaatcagaaatgaaaagggggacataacaacagacactgaggaaatccagagaatcttcaggtcatactttgaaaacctgtactccacaaaattggaaaacttaaagaaaatggacaattttctggaaagatatcacctaccaaaattgaatcaagaacagataagcaactaaaagacacctatatcctcctaggaaatagaagaagtcataaaaagtctcccaaccaaaacaagcccagggacagatagcttcagtgcagaattctaccagaaagtcaaagagagaataccaagtttcctcaaattgttccacacgatacaagcaaaaggttcatttccaaactctttacgaggctacaattaccttggtacccaagccacacaaagacacaactaagaaagagaactacagaccaatatccctcatgaacattgatgcaaaaatactcaataaaatactagcaaatcgattccaagaacatatcagaaaaatcatccaccatgatcaagtaggcttcatccctgggatgcagggttggttcaacattggaaaatctatcaatgcaatccaccatataaaccaactgaagaagaaaagccacataatcatctcactaaatgctgaaaaagactttgacaaatccaacaccccttcatgataaaggtcctgtagagaccaggaataacaggaatgtacctgaacataataaaaacaatatacagtaagccaacagccaacatcaaactaaatggggagaaactcaaagtgattcctctaaaatcaggaacaagataaggccgtctattctctccatatctcttcaatattgtccttgaagttctacctagagcaagaagacaacaaaaggagatcaagggaatgcaaattggaaaggaggaagtcaagatttcactgtttgcagatgatatgatcgtctaaataactgacccgaaaaactctatcagggaactccgaaagttgttatacaccttcagcaaactggtaggatacaagaataactcaaaaaaaatcagtagccctacaaaatcagatgaaaaatgcaatgagaaagaaatcagagaaatatcaccctttacaattgccacaaacaacataaaataccttggggtaacgctaaccaaaaaaagtgaaagacctttatcataaggattttgagtctttaaagaaagaaattaaagatgatactagaaagtggaaggatctcccatattcatggataggtaggatcaacatagtagaaattgcaatcttgccaaaagcaatctacagattcaatgcaatccccatcaaaatcgcagcacaattcttcacattacttgaaaacacaattctcaactttatatgaaaaaacaaaagacccaggatagccaaaacaaccttgtacaataaaagaacttccggaggcatcaccatccctgatttcaagctctattatagagctatagtcctgaaaacagcttggtattggcacaaatataaacaggcagatcaatggaatcgagttgaaaaccttgatattaacctgcccacctatgaatgcctgatttttgacaaagaagccaaagctatacaatggaataaagaaagcatcttcaacaaatgttgctggcatagctggatgctggcatgtagaagatcgcagatagatccatgtctatcgctatgcacaaaacttaagtcaaaatggatcaaagacctcaacataaacacagccacactgaagttattagaagagaaagtaggaaatacctttgaatgaattggtacaggggacctcttcctgaacataacaccagtagcacagacactgagatccacaattaacaaatgggacctcctgaaactgagaagcttctgtaaggcaaatgacacagtcaacaagacaaaatcacagtccacggattgggaaagatattcaccactccacacccaacagcgggccaatctccaaaatttacaaagaactcaagaaggtagtctccaaaacaccaaacaattcaattaaaaagtggggtacagaactaaataaacaatactctataaggaatctaaaatggctgaaagacacataagaaagtgttcaacatccttagccaacagggaaatgcaaatcaaaacaactctgagatatcatcttacccctctcagaatggccaaaataaaaaacaccaatgatagtttatgcaggagatgttgtagagaaaggggaacactcctccactgctggtgggagtgccaacttgtacagccactttggaaatcagtatggtgattcctcaggaaaatgggaatcagtctaccacaagatccagcaattccactcttaggcatatacccaaacgaagcacattcctacaacaagaacatctgttcaactatgttcatagcagcattatttgtaatagccagaacctggaaacaacctagatgcccctcaactgaagaatggatagagaaaatgtggtacatttatacaatggaatactattcagcagacaaaaaagcaatggaatcttgaaattcccaggcaaatggatggaactagaagaaaccattctgtgcgaggtaatccagtcacaaaaagacaagcatgatattttctcactgatatatggattttagacatagagtaaaggattgtcagcctgcggcccaggcttctggagaggctggtaaacaagaaggaccctaagagatacatacatggtcccccggagaaggggaaagggacaagatctcctgaacaaattaggagtatgggggaggggagagggaacttggagaatgagaaggggagaagcggaggggtgaggaaaacatgatgggatagggaggttgagttgggggaagaacagaagagagcaagataagagatactataatagagggagacattagaagtttaaagagaagtcaggcactagggaaatgcctggagagctacaaagatgacaccaaggaacaatctaagcaacagaggaaaggctaccttaaatgccctctcctgacaataagattgatgactaattcctatgccatcgtatagccttcatcccgcagctggtggaagtagaagcagacacccacagctaaaccttgaactggactgaaatccagatgcagagaaggaggactgatgagcaaagtggtccattccaggctggtgaaacccacagaaacagctgacttgaacaagggagaactcttggtcaccagactgatagctgggaaaaaagcatgggactgatccagaccccctgaatgtgggtgtcagtgaggagaccttggaaatctatggggcctcttgtactactggatcactacttattgctaccataggaatggactttaggagcgccatcccacatagagggatacttcctgagcctagacacaagggggttggcctagaccctatcccaaagaatatgacagactttgaagagccccctatggaaggactgaccctccctggggagcagaaagggtatggaataggtagggcgttagttggggggcaggggacaaggggagggagaaggatctgggattgacatgtaaaataattttctttctaataaaaaagaaaaaaagattaaggcattaactcctcttatatagtagaaacagagtgtacaaattgactccgatgtaggtgatggtaatatccttaaaaatataactagaagaaaggatttttaaacgtttctaccataaagaaacaatgtttgaggaggtggagagatggctcagtgattaagagtatgcactgctcctgcattgaatgtatgtttggggtctaccaggcattttgggcagctcaaagccacctataactccaaccccaggagatctgacaaattcttttgtacttcactagcatttacacacacacacacacacacacacacacacacacacacacacacacacacacacacacacacaggacaacccaaaaatgcacacatacactcataattaaaaatctcaaagaaatgatgttggaggagacagtgttccccatgacttctacattgggggacacacttgaaggacatattggtaacacccccctgctttctcattatcaggaagccagcaattctattctatcacatactttgagtcattatactctgcttcatcacaagtccaaagttataggttttaagtgacatggcctgaaacctctgaaactgtgaactcaaataaatatttctatcttttacagttgtgtatctcaggtacattgccatagtgatataaagctggctaacacaaagtgtttaaataccagttaacctctaggctgactttgtcattcatttctctatctctggactcccaagaagaaccatagaagagtggcgaaagggaggtcatattaaaaccataaatcactcacttcatctatagtaacaccagacgataaatttcagcaacacaaactataccagtgtgatgaggtacataattggaaagctgtttctcattagtcaaaactactcatttggctatgttatgaagcatgtaacaggaaatgaagtaagatctaagaaaaatgctgccatttccatcaacaattttgcttaaattactcagggtaacttgtgtatttcctttttttttcttttcttttagaaaaagaagtataaattggatgcagcttatttttcttgaaaagaaatgctgatctctatttagagcttaccaatagtattctttctgttttcttcctgtatacagaagagatgagcggggtgtgtgtggggggaagcaggggaaccttctgaagatattttttgtagaaatggtttcttgcaccttcaattacttcatggcaggtgcaatgactactctgtgctctctggaggacaaaagtggcattttgtacttacaaatatgtaactgtatcagtaaaaatgagaccatgctgaaaatttgccctgagacgtttaaagaacactgagctttgactaaaagttacctgtaagtcaatgccaaatgagaaattccaagtttcagaagttcagccattgatcagggaattggagtttccaagccacaaagctgtgtaaacatgcatcagtgcaatctggtcacctcaagcaaaaatcagccaggcacaacagtgctgaattctaattgcatctatttattttaacttcgtaggaaaatgagaatgctagcccagttaagaggtgataaactttcagacagactccacttgtttgtgtgatgccaactttataagtttgcctgtacatattgctacagttcttctcactccgaggatggaaagtagaagaaataagttcattctcagtttataaaataggacactgaaggtaagtgatttgatcggcacagcagaagtaggaaatgacaaaattagatgttttaagacttgcaaatctagggatctttttccattctaagctatgaagagagattctaaggctctgatgagtcagacaggttaatatttgatgaattacctttgggtgtgagacaggttctatggctagtcacactgaattatatctggtattcacaatatcactttgacatccggcattttcctctttgctcatcaactctactaccttcatggtctttaattacatattcacctatgaataatgtgcatatcttatttattacatacagttgctattaatgggtattctactctgtcctactaagcatgtgctattgttttcatttaagacaggtttattttcccattgtgtaaggtaaagtgatagacatgatttttaattttatgcattcatcaaggcatgaaagaatattgtccagattaatagactattgaattagaatttaatatctactttatgtggaagcaatatgaagaatcacagaaaataacctatttgtaaatcataaaagacaaacaatatcaataatattggctatgtattggtattataatcaccagctactgtgctaagttatttgtcttcattatctcatttaagtctcaaaacaactggattagatgaatattcttctatacattttatgcaaagaagccatgtttaagtgcaagtgggtaatttgcctaacttccaacaactagtgatgttgaaaaatggatgagaatctagtttgtctagttaaatactgctcttttaccactgtatcactgacactcaaaattcagtggtatctgaagaatgagctgaaatgcttgttaaaatataaactcctttttgctttatgctgcaatttagcagatctttcttgggtgcactctaagatttttaattttcatagcacagcaggtaattcttatactgattttgtgtgtgtgtgtgtgtgtgtgtgtgtgtgtgtgtgatggacattgagaaatactgccatatattacagtgacacaactaacacttttatctccatagtaatttcaaatgagtcattttaaagcaaataatacttttgagggtctcttttattctctggttctctctctctctctctctctctctctctctctctctctccacacacacacacacacacacacacacacacacaaaattgttcggtttttaagttcataaagctcgctgtatcactgtagttgagaacttgaccagaacagattgtaatgtgatgtgatattagaatattgatattttcataatggtttcttatacataggtttagtctgattcaatgaggacaaacaaagctgtatataggtataaacaaatgcagctaaacgggggagaaggggaaaaggagaaatgaaggtaaatgctagaataaacgaaagggagccaaacaagaagattgagttatttttgaacttaaataagtacatttcattcaaaagacaaaaaggttctgattaaaatttgtgttttgacagccctgtcctttgctgattctgtttaggcccttaaatggaatgacagggcacacaatccaattggctgctgtgattaaaaggtcagccagtgaattcagcaccaacaaacaaacaaacttcccttcccaattactggcattttattcatgtgagcaggaagcagtggaaaaccagtacccctccctcacaaatccaaggagaggctccatccactttctcctggtgctttaaggaaataaattcaaccacctttaaataatcccagcacatatatagcttttcaggctcaatgactgtgttctttctctacttctgaactattagtctagtaggaaacccttagaaaattaaaaggtttttaagaaaaggaatcactttgtccctaaacaaaagaacaatgcaaaaggtcctcccgcagacagtctgttagatatcagattatttccaccatgctcccctattattcacctgtcagtaaaatatgtcctctcactgtttcggtttgaatgcctatttttatctgactggagctatatggtcatttttgtatttattactaagttctttaggttgtctcctgcttctttgccccccacctcagcgtatgtttttctcttctgaaaaactgggccacatgcctctgaggagaaagtagtgcattatttcattcccaccttttcttctttttggcatctctgaggcctgctatgcccagaagtgcttctactcaagctggaccatcaaatcaattatcacagcagtctgctttccaaatatgaatggcaatgaatgacaacaggcaaggcaaactttcagctttgatttgtcattggtaatgtaaatctgttttgggtcccctacccttctccttttatatctctgtttctccccgtatctgtctttctctttccccctttcttattctcattccagagggtctagtgtttggccaaattcttccccttattttctgcagctgcagaaaatcaaatcttcaaataaaagcttcacctttgtgagtgaaagtcacaggagggaaatagtgctggcaactattatcactctgaaatctctccctgctaacttctgggcctgattactactgcctgggaaggaacacaagagtgttgcattcttattcattggggctgcttaaaattcttgcctgcttctgtatttcaagcttcaattgttttgtgcttaatgttactcatttcatatcaagttcttggttattggaaatactttaatttttaaaatgttattatattctagctgtttaaaaagattgagaatgctataaagcaagagactggtttaagcaaaccagaagtagctttcatgatgctgtgtgtactcattaatccatcaattttgtgaggatgtctgcaatttctagtatgctatagtgttttacatttttttcctcaagctgacagcaatacttctcattggccaatgacaccagactttcaccaattatatttataaatattgctttaaaatgagttcaaagcagtaagatcccttgagagaacagggaaaagaataaattacggcaaacacagttcagtagaaattctgtggtaaagacttaaaatatagattgtcttgattttgtcaagtaatggggagtggctaaagctgtacttataatcagtttaagtggtgaattaagttgtctattctcataattagtccttatattcaaccataagctactttacaatgtgcatacattattctttgtatgtgtaaggtatgggtacaaataatagcagagtatgaattataatccttactacccccaaacaagctaagggaaataatgagtttctacttggcacttgttatattttcaatcctgcttcttgactacaaatctccctcttagtgaagtctgcctcatcatcttcaacaggctccaaaatacagaacaatatccctcatgaacattgatgcaaaaattctgaataaaataccggcaaatccaatccaagaacacatcagagaaatcatccaccatgatcaagtaggcttcatcccaggcatgtaaggatagttcaacatacgaaaatccatcaatgtaatctaccatataaacagactgaagaaaaaaaaaacacatgatcatctcactagatgccaaaaaagcctttgacaaaatcaaacaccccttcatgaaaaagtcttggagaaataatggataacaggaacataataataaaacaacataataaaagcaatatacagcaagctgacagccaacatcaaattaaattgagagaaactcaatgcaattcctctagaatcagggacaagacaaggctgtccactctctccatacctcttcaatattgtccttgaagttctagctagagcaataagacaacaaaaggatatcgagggaatacaaatcagaaaggaagaagtcaaactctcactatttgcagatatgatagtctacataagtgacacaaaaaactctaccagggaattcctacagttgataaacaacttcagcaaagtggtaggatacaagattaactcaaaaaagtctgtagccctactatatactgatgacaaattggtggagaaagaaatcagagaaagatcaccctttacaattgccacaaacaaccttggggtaacactaaccaaaaaagtgaaagacctgtaccataagaattttgactctgtaaagaaagaaattaaagaagacaccagaaaatggaaggataccccatgctcttggataagtaggatcaacatagtaaaaatggcaatcttgccaaaagaaatctacagattcaatgcaatccccatcaaaatcccaacacaattcttcacagaccttgaaagaacaattctcaacttcatgtggagaaacaaaagacccagaacagccaaaacaaccctgtacaataaaggaacttcaggaggcatcaccatccctgacttcaagatctattacagagctatagtcctgaaaacagcttggtattggcacaaaaatagacagctagaccaatggaatcgagttgaaaaccctgatagtaacccacacacctatgaactcctgatttttgacaatccaaatttatacactggaacaaagagaacatcctcaacaaatggtgctggcataactggatgctggcatgtagaagactacagatagacccaagcctatcgccatgcacaaaacttaagtcaaaatggatcaaagacctcaacataaacacagccacactgaagttattagaagagaaagtaagaaatacctttgaatgaattggtacaggggacctcttcctgaacatagcacagacactgagatccacaattaataaatgggacctcctgaaactgagaagcttctgtaaggcaaatggtacatttacacaatggagtacttactactcagcggggaaaaaaaaacaaaacaatggaatcttgaagttcacaggcaaatggatggaactagaagaaaccattctgagcgaggggtaacccaatcacaaaaggacaaacatggtatgtcctcactcatatgtggattttagacatggagtaaaggattatcagcctacaatccccactgccagagaagctagtaatcaaagaggaccctaagagagacatacatggtcctctgaagaaggggaaagtttcaagatcccctgagaaaattgagagcacgggaagaggggggagggtgctaccagaatgagaagggaagaagaggaaggatgcagaggtcatgaagaatagaagaaaggatatgtgataggtagggttttatttgggggagggtggtaggggatgatgagatggagaagggaactgggattgtcatgtaaaacaattttgtttctaattcaaataaaaaagacaaaagaaaatctgagggaataaaagaatccagatatgaaaaccagactatattaaagattagtatttgatgagtattattgtctaaatctgaaatgtccccaaaggctcaggtgttcaaccattttccccaagctgggtacactgttttttgaagctgtagaatgtttaggaaatgggtccacactgacagaagcaggccatcaggggtgggccactggagattatatctgttccctaattcctcattctttgctttggttctttcttggtctgtggttacatgaactgcctcttccattcttttttacctccacaaaatgagtagctacagtggaatgaagactctgaaaccattacccaaaataaatctttcttcctttaaactgctcctgccaagtattatagttaaaccagtgaaagggaaatacactaaatgtcaagagcattccacagaaagcctagagtctgtaactttagcatggggtatctgacacttcatggggtaaaaaagatctaagctaagcatggtagaaatatggattgggttttcacaggtaggaagtcagagagatgttactaccaatggcaagtaaatgtattaaactaatttactcattgtatattttctgaaatacatagttttgagctaaaaggtctttggaattatttttataaatggctaactaaataggaacaaagaagaacttgtataaagtagaaaaggcaataaatggaaaataaggacgtctttattcttatggatatgatattctagatcaaaggctgttctcaatggcacagcaaaaactataacaaatatgactctagttctgcttgaacagtgcttgtttcttgttttaagatgtctacctatgaagctcaggctggtccaggtgttgagattataggcttggattatgaagctcaactttattagggaattcttataaaatagtgcccaatctctcaagagaattgtgagttattccaaaggactctttctacctagattcataaaaaaaaaaccaccctgcacttagagtatatactatatagcaactgcaatctgatgagtctccttccttggccagcacctacaccttctattctactttcctaggtcaatgacaacaatatatagctgagtgacttacagcaggagtgcttttattcacagttcatgaggaaagaattttgaaataatacccagcaggattggttctttctgggggctctaaggagagctcattacattcttgtttctgctggctgccagttacctttgggattacttggttcatgcatgtatcactctagcctttgcttgtacaatcttaccacattactttatgtgtctttgtgtccctgtgtttcacaaaggattcttaagaggatttaaggtctatcttgatccaggatgaacacactttaacttgagtacatcttcaatgaccctattctatacaatcatcttttgcaaataaactcttatttacagaaacaagggatcagtaattcaatatattctggtggatgacatactttaacacacaactatatcacagtctagtgttaactgattatttccctatgtggatttacacaatccatttccaatgattcatttcccacatgtatttctttttaaacaatcaatttcatacaacacatatactaagccaactgactccaaacttccaaactaaaatgtctattatctaatttggttttggacatattggagctgtcttagaaatacattttctacttcacatagtagaaggaaggtagtacactcaaagttacattagaccctacagggagatttaaaaaaaactgattaaaaaaattggtttctactctcagtttacagccctgaggtttcacagaatagaatgttctgcagtggaagggatcataaagatcatctattctaaacaactcattttatagatgaggcctttgaggcccaaagaggttaactaacttgcccacggctcacaaagttaattgcaaggaacatgcaagggaaacaaatgaatggcacaattttaaagaaatccagctagttttttgcttccaaactgaatatacactgaatgttgatgatgtgctatgaagagattagatcaaagtctagcagtcatgagcaattctggactaggcgccaagcctcttcatcttctcctttgctgtgatctctgaagccatacaagggagcaaaatgactccataatcttttttccccacctggggcttggggttagtttcagttatctgggaaagcaataccttaatagtagaaaggtaaagggatgcttttctggctttgctcttctgcctgttgtaattctctgaagcccaaaagggaagggtagagagtccctagagcagcagtcaggcagaaaggacttgagcatttgctaaaagagatgactatgacccaaggttcaatcctgtttcaaaagaaaaatattcataattgctgatagttttaggaatcaagaaagggcatattacttacttcaagtataacaaatccttggaagagcttataagaaagtctgcgggtcagagatgctctttttctgacccttttataaaaaaaaaagaaagatgattggaatgtgaaattgaactggcagtaacagacttatgagtaatatgccattattaaaaaacaatatagtatcatggtgttctaactaaactaaaggtgtaattaaaccaaaccaaaaatattgaggggctggagctcagtaaataaaagcactatctgcttttgcaaaggactctgttcagttcccatcacacatatgacagtttaaaaccaacatcctccccttcaaggacaccaggcctgcatatgttacactatacacacatacatgcaggcaaatggttacatacataacaataaataagtcttttaaacaacaatgaaagaacacctgaaaaaaatataagacatcacaggaaggaactaagaatttatttatctcttttgtttcccacagcactaaattatgtatgaattaatggaactggcttttcagctgtcttgcctaatatatggagaagcttacttcttgctcaaaaaatgggaaaggtttaaaattaaagaggaaatgcactacttttcaagtatactattttgggatacattgaaaaattaactgtgtttctactaatttattcagtatttcattcaaaatattctttacataattacatttctcagcactaactctaagaactgcaattccaaattatgtgatttcaagtgcacctatatgcaaagatgtgaatttagcagattttagcttcatcatcttgaaaatagagctgtggagcaataaagtgatgtgttagagattaacaaataagcttacataataagagattccaacacacagtagaatgtcacattctttgtggttttgacaaacgatttgacattgtaatgaccatctctatgaggggtagaatctaattatgggttttccgactcataagaagtttttgagggattttatttacttgggacagtactgcaaaactcattcatgaaatgatcaccctctcaagaaagttctaactttggaaaactccacgagttaataacttattagaagatagtctcccttgcacatctctttcattgtgcccggagagctgtgattttgtcctttatgatatagccgagaagtggagctttttactgtaaattttcattgcagacttcactaaggcttgtacttggaaaagcagatattattacatagttattaaatttaaaacccacactttacttctttggtcacacatgcagaaatcaatgtaaggatccaataagaaactgctagggaaataattctgcatatatttcaatatttcaatttaataatattgtgtaattatctaattcacctcctgaaaaggatagagctgatttacttgcataatttcccctaattatgtaatttgaaaaggatattttttaaagtagtattgtttagctaataagaaatattaccttttcaatggaaaaaataattctataacttaggatttttgaagcttaggattttttcttatacaagttttgtacaaaagcactattaagcccttacatattggctgaaattcagaatttcattcctcaaacccaggagacatacaattcaatttagatgaggtaaggtgcatacaatggtggcagagaggatttttagtgtgtacctatacctttgctatttgctaacacaagcctaagctgaactttgatagtttgctatgagaatgctggctggagaagttgtttcagtgtgattttagacttttccaccgtttaatactacacaactacttttattgacttcctatgaacatgtaactacagctggtgactaatcaaattccatggcccaacatgaaaaagtattctgttattttaacccaaatacgaacatgactttatcaatgtttatattaatgtgatgtaatttatggctatataccatcagaatgatgagtgaacatggacatttcattttgaagggaagacccagacaatagatttgtcttaaatactagtattaatgtgttggtttccaataacacacagcaaagctccaaaataactaatctttacatatgatgtatatatgagcttttaaaaatatttgcttggtaattttggcaatatgtgtttggtaatttttcatttctctctctttttttaagtaggcatgctgtttccactaggattacagtagtagtactattatgtaattaattttggaaacattacagtatttccctgaaatgacctacagatacaacttgacaactgaatccacttagctagtagcatggtgattaaaatctgcacttgcacttcaagacagcataatgcttatacaggactgacaacaagccattttcttggctaatacctgattgatggtccattcttaacatgcttggagaaagacattaataagatagtctatgcctctttttttaataaaccttgcaatatctacagatgatctctatttcagatgactctaaatagctaaatacgaataaaaagaacacctttctggctcattaaggcaattgctcaagctgtcattagcattacctttctgaaactgtagtacatgatgcagcaggccttgtctactgcacaaactaatggcacagagctaccttttgacagcaggactaaatttacatactttacatattcagtgactaaaaaaatttacattaatcaatatgctacgtttggggggattttaccccatttgaaatgtacctgtacactttgaggcctagttactgacaactatatataaaatgaattaactatgtcaaggcaaaagaggggctttacctcttactttgccctacccacttttgatagagcaattgtaaattatgcttcagaagataaatagcaagtcatgcctgaaaagatgagatgctctggttttcatcttcagacctgcgaggctgactacctgtcagataaggctgaagctaggattatgtcttgaaaaagctgacaaaccacagatttttatcactaaatcaaacctgctgggtttaaactctgtgaactttaattatctcatatttaattaaaagaactagattaagctaaaaatggagggcagggggaggtccatgcaaggatattcaaggagctgttagggctgaagtaatttcattttcacaaatcaaatttcttagttctaataaagcaagtttacatatagaggagattcaaggaatcacttggctggataatagtagaggttatctagtccatccctgaatgataatcgtctactttgttcttttgagtctctgcacaaagaggcttctgcatatggtgaaaaggtttcatactgctaagggctgttctccagagaatgagaaaatggcaatgtttagacttcatcaactaagagatgagtgcatctgtgttccgaaggttgcactactattaggtaaaacagtatgattaccagtattttcacattgcgtcttagaagaataattttactatttaagcaggaagtcctcattgatcatctcttctcacagttgacaaacttttatcttgcaggaaatgttttgggttttaaaggatatagggtctctgtcataactgctcaactctgccataaataatatgtaatggatgaatgtggatatgttgccaaacttttatttactcttatcttggctgttttctaaccatttagattttgcccagatttcagttcatctataggctggtgtgtcgtcttctagtgtattctacatataaatcatatgaagtgaaggtaaaataatataaaacagagacgctattcacaatggttgggagacaagcccccctccaccaaaaattaaagaactgccaaatgatatcaaacagcattacaaaggggctataatgtgtgggatagcccacaggattaaaagaggaaatggctatagtggctactacagagtagttgcagcaggattcatgtgtaactaattatgccaacaggaatcatctgcacgtgtgtaaatggagaagagacagaaagagcactccaaatgggggaaatatgatgacccatttatggagaagtagaagaccctgtctaagcagaatcaattagaggaatgaattcattcactcagtagataagtattgatcacttctctgtgtgttaggcgttatgctaaatgtgaaaccgactgtgatgagttatatacaattcttgtattgtcatggctcagtcttgttagaaggacaaataaacaaacaattacaattcaggacaaaccatgatcaggtgtttgcactgaaatctcaagtcttatggaaaacacctgggataatttttaaaacttatgtcagtcctcaatcttccattcatttacgtttaaggtagaggtctgtgatttaaaatttaaaaggaatgaaactgctatttaaaatttttttgtggtctctcctaggagtgacacaataacctttgctacagaagtgcgtacattatatgactttcctataaggaattttcagagaccctttcaagattataatcataatcctaaatttggcagggattattgtctttttggttggtgtgactgaaattgagcattctatcactggacctaacaatggccacacacctgtctgaaagccttttcagcaatgaggcaaatgactatggaaaagcctagaatgtttttattttcatcaaagatcttttaaaaaggatttatacctacctacatgagatggctcaggatcaatattgcttggagcataacataaattttcaactctttgatttgaaaagtcttaaaagaatttcagtaactatttctaccaattaatcggtcatttaaaaatatagtggtattgctagtcttgtttgtggcaagagctaaaaatctagctagatgtgttcctgaccatatgaccaaggaaacgacgagcaatcccataaatctttctcatgattccccaagtaaaaggcgataatgtaaggaaagagcatgttgtttgaaacctgaaaaactggctttaagattccaattcagttattcactagggacgatattgaacaagctacttgacttctttaagcctccattcctaaactaaagaagataaaaactgatgctctggcacaatgtgcagatggcatgagatggcttacataagatacctgccaaccatacccaagatgctgtagagactgacttctgttgttctttctctagaggaagttctaactcaattgtttttagggcactcagcatgagcagcagacacaaaggtgtcatttgctgtataaaagacataagtaaactcatagcataaaagagggaacaggcttgcatatggataacttttctgctagggttattgtggataggctatgagcagtggtagttactaaccaactcaactagaatctaaatgtgtcactgcattttcacactcattttttaagttatctctgtcatagaccccagaatctaaatgtgtaactatattttcaccctcatttgaaagttatctctgtcagatcccacctgttttggctggttttcccagacagggtttctctgtgtagccctggctgtcctggaactggctccgtagataaggctggctttgaactcaaacatctctctgcatctgtcttataagtgctggggataaaggcctatgccactcctacatccctctttagaaggcagagtgattagtgacaggcaatggtgacaaaaattagaggaaaacaaaattttcctagaaatgcctctattttctacaacagttgagaaatactctattcattttttgcgcccttggcatgttggaataccaatactgcctctgtttaagaatagatcatccatgcttctatactcagcattagaatgagacttctttagtaaagaatatatttggaaggctctctgaactagaacaagtctatccttctgtgaataacagctatcatggcctgggaatatgttctgctcttcagttttcatcttaacctgaatatgtcacacatattggagttgagtacattgcacagatatttttttaaacagtcttaaaccttcattacattgcattatctccaaatagtctatctttgtttgccattaaaagtacactcactactatcactgcccaatgaatgagttctgaagagatgaattatgcatccaaggttgtatttctctacagaaaaatcaataagattcccaaaatatcacaatagttgaataacaatagggaaaaactatcatattgctatgggccacacccgaaggggtgagagtctacaaaagaaagcttaaataatcggaactataaatacatagttcctttcatgcatatgtagcttgattgcataacactcatatatgcaaagaatggaaatatttaagcactgtaccagttatttgcaatcactttaataaaacacctagaacatgcaatgaaactatgctgattgtgatggcacatgcttacaatctttgaacacagaaggctgaactgggaggatcaagggtaatcagaagtatgctgcaagttacaagtcagcctcagtgacatagtgagaccaggtctcaataaacaaagagagacagaatcaagataaaataacaaagtgtgttataatattagtttatgattgagctgatataatataaataaaatttaagtgaagcaaagcacagataatacatgttttttctcactgaaaatcatgcagtctggctgaatacattacatagtcaaggaatgaactggttatcaccaactccagcagcattcaaatttatttctttggaaagtaataagttaatgaaaaggtgctactttctatgatatggatgtccttcactattagaatcttttgaattccacaatgaatacatattcatgaatgtgcactcttctcaaaacaggggtttagacagtctactccattaaacataagtttatttttctcccaggtatcagccagggaatcaacattctggtcagtggccttttcatgatgtttgtcctaatagatgccacctggaaataaaaccaactgatgtttaatggaatagcttttaaaatctctactcagggagggtgttgtttcatgaagaactaattaattcaaaatgttagaaatgaatataaattccttaataaaactgtaaagctgaaagcaatgaaatcaggagttaaacaaaactatataatttattttatattatatactgatattcttttgatttttctaataattggtacctgtacccttgggtctttttctggttggactattttcattgccctctcaagtttctggcatatttgatgatgacaaatacttgcttaagtatttgtcacattgcttaagttgcaaaagttatgaaaaacagatatatgtgtcctggttcagtgatctattacatggctatactctcagcacacaagcaatcatatagctagctaatgagtagtaatattttagtgttacataaaacctaaaagaggtatgtacctcggaatcctggttcccttgagaaggaaataataataataataataataataataataataataataataaactgtttgtggggctggagagaagtctcagttattaggcacactggctgctcttccagaagacctggggttggttcccagcacccacacggtggctcacaaccatctgtgaatccaattcccaggaattctatgcccattgtggcctgcacaagcactgcatgcacatgaccatagacatatatgcaaacaaaacacccatatgtataaaataaaatacatctttaaaaatccctaattcagagcattctatgttaaaacccaatggcaaagtatcaaactaaaataacactcttgttaaatataaactacacatgacaatatgaaagaaatataatgaataatttttccaaattttgttagattaagagggaggacaatggggatcgtgaactccatatacatgacttctgttgtgttcagctgaaagcaaacaatatttgaataacttcagtttctgtcactatgggaagatactagagctaatgcacatgacacaaatccctacttccttacagacttgggtatttgtgttccttgaaaaacattctatcctgttcaccctaggtgcccacaatgattattaggagtagcggtcatgtttataagtgacaatggccaaaggcctatgttcagaatattataatagcctattgttctactctcgagcaaaaactatctctggtatagaatgtatgatggcagtaaggacacaatgtacacgaatcctaagtggaaaaactttccttcgtttttctaaaatgtattttcctgacagcttggtatgattgacagttcttacacactgacctaatgaaccttcagcctggaaaccttcatacattgcctgataagcagtgaactaagttttactataggcatcattcctaagctccagtgatctgactaaagtgacatggcctccaaattccactgtgaacatttattgcaggccagttaaagtaggaaagttatcaaactgactttgtccctgattttataatctttctatgaactagcacaaatcacctgttttgggtttgatgaaacatttcattgcatattgtccatggaaaatgcacagaatgtcagaatgtgctagaattttgtctctgctaatattttgcaaagggataaactatggtataggaaaataccatatagatacaagtccatatgccaattatttgcttattctcttgcaaacaatgaaatacattctaatatatatatatgcaatgaataaataaatgtaatcatttaaaattaaaatatattgttcatctagtgattttaggtgttgtttcttccttagccattagagtcaccttatatgaagtaaaaagtagacaggacacaacaccagtatggcaatgactcagaattgcccctaacaccaaaaatatgctctttaaaaagcagtctgtcagaaagagagtaaaactcatttatttgaaatatttgtataacaccaacaaaaaggaattagtatataactgataagtgacttcctctggaatttaatgaatgggactttagtatacatatgctgtggttaacattttaaacttctcaaaatccttcatgatggaatgttgacatctcatattcccaaattaaaacattcattcattgctctaagtcaaagatgaaggaaagggtgtgttcatcagatgtactgtgtacacagatctttaagtttagcttcatgttgtctttcagtcctctaagaaactatgactgatttgctgaagaggactggcttccacattttccccctggaagtatactttaagatctactatatatagtgtataagtatcctgtacatgcgaccaaggtacttatctgtaagggacatagttggggtgctaattacaattttgagaattactatactggtattgagcattaacatcagttcatttgtctgctattcccatacttacctaattcctccctttcttttccttccttccctctctgtctttctgtctctctgtctctgtctctctctctttcaactacatctcctctttcaagcagtccttgaagtagcagttttatgtatcctgtcacattatctctgtcctggtcaattggacacaggttagacagccaactcaagaggaacaaatccacaggccacatcagagcagtcaggtgctgtcatgaaaatctgaactaggtcagactaatatcatataaagcaagagccatgctgcattgcagctgtgacagtcatgtagttatgatcacataggaaatgaactgccaaaaaaaggagtagatagaagtgataatgaaaccaaggtgagtaaaatctctactaaaacactagctgtggaggaacacagcactaccttgaatggagagcaaggaacccatttccagaaatctagatcaagatgtgataaaggtcttgccttaaattcccttaagcctctctgtagctcttcaacaaacactccatttaaatagctttttgtcccttgcaatcagaagaggcttaattaagtaaaatatttattaatatttctttaactactcatataaaaatgaaaagtaattacatatccagggcctagaagataagggatactctaagatgcttcctttctctaacatacttctcaaatattctcaatacctttccaatgctgtcaatgcaatatgctccacttttcctttctgggtcaaaatgctttatcactatcttatcaccaggaactaaatggcataggtcttttgttttgttttttgtttttttgttttgttttgttttgttttgtttttcaagacagggtttctctgtgtagctttggagcctatcctggcattctctctggagaccaggctggcctcgaactcacaggcctgcctccgccttcccagtgctgggattaaaagtgtgcgccaccaacgcccagcggcatgggtcttaagaatgaataattaatcattctatatccatatagtatctatggattcattttgtttaacatggtagataatagtttaagcctatattcttccaattaaactgtgaacatgttccttactgaggtcctttacccttcccaggctgacaaaacttgagagcatattgtataattaccaccttgaaaatactcctgaaagcagtgaaacagcaacctgagcacaaaccggaagaaagctgtaaacagcttcagatgatttataggaaaggaattctacaaagcttccttaatggtaggaaataaacagtttttactgctatttagttaaatgataattacgaaactcattgaactgaatgagaattaggattgtcagacaaatgcttgtaaggggttaattaattcatacgaaccacacagctcagctgaaaatgggctcattattctaagccactaacattgtctgctccttagtactgccttcctttcgccatttcattcacactactgcatccccaccccaggagtaaatgtcagaagacagaatatttaaaaggaaatgtgagctaaaagcattttgcaagggtacatcaggggtacaaagatgtctgctggaacactgaaatggaaagatcatttattagtacaccatggttcagaacatcccaaagggttcaatattttcattacgcacacaaatataccccctcctccttttcaaatgcctcattacagctaagcctggagcttttttcttaaaaagctttcctctgaaattattaataatatgaagttccctacaggctaagggtattattacagtcaaaatacatcaatatgtatatatacgtatatacttatatacgttctttcatactattttaaataacaaagtatttagtgggaacagtaaagaatttataagctctacacagagaagcctagaggaagatggcaatatcccagactctcagaaacagctcttgaagcttattaggtgggtgtaggagactgtaataggattatgagttttggtttagcctgtccatcatttcaaaatccccataactaaaggaaatatcttcataggggtctgagtttagtattgaagctgctttatttaattcttcctattttataatgctgagtgctaattagttccatccactttctttaggcttgtcaataaggcaacttggaagccaagaacctgctgaattatggattaaccagttctgtaacagcatattcaagcaacctagttagctgctccaaagcagaatggtattataggcacaggaaagcataaaatattcttcttcttaaagacaggacaattactccttgcaagtaacctgtttatttttgatatgttaacgaacactttagatacataaaagctaagataatatttacttttaagtgtctgaagagccaattacattcagaatatctataatatctgctgctaaaaaccacaaacaagnnnnnnnnnnnnnnnnnnncttcttttttaaatgtaaaggcaggaaagattaagacactgacactgagtggcatgactgtaaagtctagcttcactcttaatgaaccttcattctggtctctgagcttcctaccattttccaaccttagtgtttcagtggactccttcctcttcctcatccagatatactttggaaccagctctctgggctcataagttctggtatctggagtattaaagatagattgaagtggtgttctcactctggaatgaatttactgacatccacaggttaaacaactagtgtgcagatagaaaagcgagcctgggaagatgaacccaagcttttgacttctctgtctaaaactccttcacttctgtttatcataataggtcccttccactatggccagacttgcctccggatagggaccctttcaaagttctgggataccctctcatagacactagtcttcttagccatgaagaattaagctgtcatccagacctcacaaaatttgatccgtgtaactattacatatatctagattactgccagagtgtgcccacgcttcccatgtttccacagactatcttccttccttatttttttttttaccttgtcacatttttactagttcattgataatttcaaatgatgcagtttggtcgcacttaccccatcttgcatatacatcctcttccctacatacccaactttctgcgtcccccatttaagcccatcaagcacaggttgtgctgcccatatattgttggatttgtgctttttccagtggagcttggttagcctaccaggggacacactcttaaagaaaactgactatgttccattgactaacaaggattggctatctggatttcaactgttttaagagtgagtctggatcacaagtttcactatttgccttcacttacagagcaatatcatatgttgctctgtgttaaagacatcactccattccctctcctaaaggtcaacatttttctaatcatgttctttctttattagcacctccaagctgttcctctgttcttgactttaaaacactagagtttaagaatgcttgcttatagaggacctgagttggtttccttcacaactgcctataactcaaaccccagtaggatacaacactctcttctggcctacactgacactaggtgcatatagacagaagtttctatactgcctggtcccacagccctttagtctcaaacaaacagaggtttatattaataataaactgtttggcctgttgctctggcttattactgtctacctcttacagcttgaaataaccaataattcttatctatgtgtagccacatagcttggcaccttctctcagtaaggcattctcatcttgtgttctctgtgactgaccagcaactctatctctgcctttcctcttcccagaattctcctagtctggtaaccctgacaatactttctcctggttcctaggtatttacatgtatgtacacttctcatagtaattcataagggcaaagtatggggattttttattagaaagaaaattatttcacatgtcaatcccaggtccctcccccccctcctcccctgccccccccaactaatgccctacccatcccataccctttctgctccccaggtaaggtgagaccttccataggggggggtcttcacagtctgtcatattctttgggatagggcccaagataatccccttgtgtctagcctcagagagtatccttccatgtgggatgggctccgaaagtccattcctatggtagcaataagtagtgatccattacaagaggccccatagatttccaaggtctcttcactgacacccacattcagggggtctggatcagtcccatgctggtttcccatcaatcagtctggggaccaagagttttctttgttcaggtcagctgtttctgtgggtttcaccaaccttgtatggacgcctttgctcatcagtcctccttctctgtatctggatttcagttcagttcaagctttagctgtgggtgtctgcttctactttctgtagtagttcagtacttatccctagcataggtgtggactttgggagcccaatccacatacagagatactcattgatccaagacacacagggatgggcctaggccctatcccaaaggatatgatagactctgatgaccccctatggaaggcctaaacctccctggggagcagaaaggatatgtgataggtagggtattagttgggggtgagtggtaggggtggaggggagtgggaactgggattgaaagtaaaacaattttgtttcaaattcaaataaaagatttaaaaaattgaaaacagattaaaggagagaaaaaggcacaaactggtcattgattgcattcgatgaagcaattttaaccaggttacacacttaagaacagtatagttccaatagtcacctgaaattcaaaattgaaaggtagcacatgcaaacccatgcaatgtgcacttgatcctttaaaatacccacaaagctagattttactcctttggattatccatgtctttttgcttcagcaacatacagcttgaagatatttttcttagatttttatttcctttttctaatgtttgacctttaagtagaaagaaaaataatgaaatttaaaatgaaacagtaaaggaaaaattaatatgagtctgaaggaggtaggaaaaatgtgattgggaaggcaaagtttgtttcaagaggagactctgagcaaaagtgaagcaagataaatgagctctgcattactgaaatttccactgatgagagtaaaggtaatatttttgtttgtctgttcgatttttacttttgtcaagactttcattatgtagctccggctctcctggaactctctacgtaggccaggctggccttgaactctcagagatttgcctgcctctgtttcctaattgctgggattaaagcattggccactaagctcagttagggaatctttagtaactacctaggcatgctattaagtaaaaaagaattgaggcgtgtaatcggggattaagatgcaatttttccataagcaattgttggaaaataaattcaatatttgagagttttgtacaaagccaatgtataatttttcctatttctttgcttttgtggttgttactgttatgtttaagaggaatgaatagcaactacattttctctgcaacattactgagggtgaaacataactatcaacactatattcttgatattatatattatttctcacaaaatatgttaaatactttgaatattcattttttcttattcactttttaatacattacaatagtttttgaacagataaatacttttcttacagtgtgaaaattagataaaagacagaaccaacaaatgaaggcaacatcaaacaggtaaaatctcacatttgaggagaaaaagaatacatttcagttagcagaaacctgggctatttacaaaaggataaagatagtagttgaatatatgtttctgtgaccaccagagaataaagctgaggaggggaattgtatgagagaataatgccttggcaaataactatggacatttaggaaaggaaacttagatataatatcattgcataatttaataggacaaatagctagaggataatttcattttaaaatagaaaaatctaaaataagatcattgctacccagaaaccacaggtaacgagtttatctgcataactctgggcttacccatttcaaataggaagactttttcttagacattttgaaaagttattattcaaagctctattccatactttgtggtggtcaataaagataatctactctaagtacacttttgctgagtcatggaatcattgtggacatcatactgtactctcagttcctgatccatggaagagacagaggaaaacctgctttatgcttaaagttttcttcatttaaaaaaactagtcttaattgttatattaacttttttgtattgccacaatcagcacctaagtgaagaacattagaaacaatttttggcagtgcttaaattcagatacttgagcattcttagtaatctgttattgccaggatacatcttcagccgttgtttttattttgatttattttttaaattagcaaacaaacagatttcattatggcattttcatacacacttaaatcctgttgatcctcttcccatctcttcttttaactaccttcctgattccacaatttttcaccccagcactccttacttatactacaccattatctttcctactttccttccttaaaagttcccccttttcatggccttttttctcatttcctagcctctactcatgctcctacacaaatatacatacattaaaattagaatctggaaactacttatgaaagaagctatttagtaaaatattttgtaatcccatcccctgaaattttcataatttcactttgtcataaaaatactccatatgtatgtgaaccatattttaattattccttcatcagctaaggatatctaggctgattctacttccttgctattgtgtggaaagacacagtgaacttggatgtacaaataggatatatagttctaagcttttgagaaacctccaggctgagtttcatagtcctattttcttcttaagataagagtgctgttatatagtttaggttccagtaactcactttgtagccctaagctggcctgaaggccattactctcttgcctcaccttccctctgttatatgttttgataattatttcatgttgtccactctaatcatagcagtattaactaatgcttcttagttcttccaatagatgtgaaaaatctccttctacctcccaatgctagtatacttcttcccatttccaaggtgacaagaaaactcaaatttgaaacagctgcgtgtaacaaaaaaacaaaacaaaacaaaaaaaaaaaaaacaaaaaaacagagaattggggggaggtgcaaggctgtcttccaatgaaatgccacacattgttaagagaattcctcacatttcttttacttcctatgaaatattgtacttttcttactttcaggtatattgtttaattttgacaagacagacagaatttctgtatatgtatagttgctggaatagggagatttcaaaccacttaagtggtattgtgttaaaatgtactgtaaatctggcttggtattgacacaaaaatagacaagtagaccaatggaatcaaattaaaaaccctggtattaacccacacacctatgaacacctgatttttggcaaagaagctaaagatatacaatggaaaaaagaaagcatattcaacaaatggtgctggcataactggatgctggcatgtagaagactgcagatagatccatatctgtcaccaagcacaaaacttaagtccaaatagatcaaagacctcaatataaatccagctacactgaacctcttagaagagaaagtaggtggtaccctcaaaggaattgataaaggagaagtttcctgaacataacagcagtagtacagacactgagatagatgattaattaatgggacctcctgaaactgagaagcttctataaggcaaaggacacagtcaacaagacaaaacgacagcctacagaatgggaaaagatattcaccaaccccacatccaacagagggctgatatacaaaatatacaaagaactcagaagttacttaccaaaacaccaaataatccaattaaaaagtggggtacagaactaaatagagaattctcaatggaggaatctaaaatggctgaaagacacataagaaagtgctcaacatctttagccatccgggaaatggaaatcaaaacaacattgagataccatcttactcctgttagaatagctaaaatcaaaaacaccaatgacagcttatgctggagaggttgtggagaaagggaaacactcctccactgctggtggcagtgctaactcaaacagccactttggaaatcagtatggcaactcctcaggaaaatgggaatcaatctaccacaagatccatcctgagtacagtacccctgtcacaaaaagacaaacatggtatgtattcactcagacgtggattttagacagagcaaaggattaccagcctataatccacactgccagagaagctaggaaacaaggaggaccttaagagagacatacatggtcccctgaagaaggggaaagggaccagacctcctgagctaattggaagcatggggggaagggagagggaactataagaaaaagaagggttcgagaagaggagggggaggaggacatgagggagcaagaagattgaatcaggggaagaatagaggagaacaagaaaagatataccataatagagggagccatcttagttttaaagagaattctggcagtagggaaatgtccagagatatacgagtttgaccccaactaaccatctaagcactagtggagaggctaccttaaatgcccttctccaataatgagattgataacttcctcatatgccatcctagagctttcatccagtagctgatggaatcagaagcagacacccacagctaaacactgagctgaactctggaatcctattgcagagagggaggagtgatgagcaaaggtgtcaagaccaggctgttgaaacccacagaaacacctgacttgaacaagtggctgctcatggactccagactgatagctgggaaaccagcataggactgctccaaaccccctgaaggaggatgttagtttggaggactggttaatctatggggcctctggtggatcagtatttatctctagtatacaaatggacttagggcgcccactctacagagagggatactctctcaggccagacacacaggggaggttctaggccctgctccaaatgatatgacagactttgaagatctgctatgaaaggactcaccctccctcgggagcacaaagggtttggaatagtggtaaggggcggaggaggaggggagggagagggaactgggattgacatataaaacaagattgtttctaattcaaaattggtctaattacaattataaaaataaaaaatgtactgtaaatatgatatatgcatcttacctgacatatttctaatatatatgtacataaacacaaaatattagtatatactatattatgctatgtaaaatcttaggaaataagttacataaataagaaatctacaatttgatatgaatcaacctaattggtaatttattgttgttccttgtttaaaaccaaaccccacattcctttgtggcaaggtcaattttgatatacatatatgtttacatttatgtacatatgtacatatatattacatatgtgtattatagatatacatgtatacataaacatacacaggtgtgtgagacttccatagttagtatttagttatctttttttaaaatatagagtgctgttagatagcttagattcccataattcactgcataatccagtgtgtgtgtgtgcgtgtgtgtgtgtgtgtgtgtgtgtgtgtgtgtataaaatcagtaattacagaatttatgctctgagatagctcaggcaaatcatgctttgtacctggttaacagttaagtaaattcttaattcacttcatttatttttctgaaatcatttgaagatagagctgtcctgatttataagaatatgcgttatacatagaaaaatgttcatgacagcattatttacagtaggaaaaactgggaaaacattcaatgtcaaatttaaggggtagaaggtgtgaattatcatacatttatttatccattataaaaaatattcaactattaaaaagcagacagaaaatgagatccactaatgtgtgaaaatgtttacaaagttaagtgaaaagtagggtacataatcatgtttacagtatagcctgaacagtataaaatatgcatagcaatatatgaaagacaaaaataaaccaaaatgttaatcatagttgcttttgaatattgagaatagagacatttgtctttgtatatttcatgtgtttctaaatttcctgtaatgagaatgcatcatttttataatgcaagctattttagaatagaacactatgttagaaaaatacttctagttatttgagaaggagggcaggcaggaagatcatgtaattagtaaaatggagtgtctatttacttagagaatgcaatcactcactcaagcagtctattgaaggtacagtatatgccaggtacagaaggacttttcggcattttttttaaatatgggtgactcagaaaacctccaaagcccatttcctttgtgctttgttttaattcttagaaaatggaactaaactgaatcattttaatccagctattctgagatgggtcactgactaaattgtaatttttaaagtgttctcgttcatgtagcatcattcctcttcacagaaatattggcaaccatcaaaatcaaatagaaagagaacaagaactctagaacttaacaataagaatccattcagtgccattttcaggatggcctaacacaggacaacgtcagtaaaaacctcaagacttcttttttcatgctgaatttgtcatttcgatacaatccccagaaacctaatagcttctgttcataggtttcatgaaagcaaatggaaagcttaaatattaatattatgtttctgctctcaacagagcttgatggctatgagctctctaatcaaaaggcttaaaatgcatttatctctaatgatggacacttaaaatagagttgcatgaacatctttacggaggaactattaggagaatgaacattttgtgcttcttagatgcatcatcaattatatcaagttctggactgaagaaagaaagattgtttttgctatccacttctagctaaaactcaggaagctacattctattaaaccaaattgtggtgctatatttaaaagtttcccccagactgaagattaataagacaaaaagtatcttactcctggacttatttttacttcatctaaaataaattttttgtacaactttcagtgtaatagtatagcttatccaggcaaataaaccattttttaacaacactcatacacataaaaattatggtagaacatgaagccaggtataggcaatgtttctataggtttgtatacttgtaattattataattatttaaaactttggctataagcagaaggcttcagatgtgggaagtgcttctgtgtatgtgtttatcttattggatgataaataaagtactgtttggccaataaggcagcaagttaggtgggagtaggagtcaaggaggattctgggaaatgtagtaaagaagtggtgatccaggcaggaagtgacacagcaggaggactcatatataaacaagggcaagaagaaagtgggccccttctctcttcctccagagtcaccatgtgagcccagggatacaggacacttattgctggtgtccaataagataagtcttataaaatatacagctttataataattaagactgagctagcagatgagaaatcctagttattggccaagcagcatttgtacctaatacaagtctctgtgtgttacttggggccttaacatggtggcaggtagacttgggcggcttggcagaaagcgcccacatggctgcagggctcagggggcttggagtaaagacttattgtaacaggcttccttaaaacaagatttgctctatctagaaaatatcagacttattctgtgttgaatgagtgtgataagctatgcaattagaatttcaatatactgcatttctgacttaccttttactgatgatcatcaccacaatcaagtgtagatacaagttaacctgattttcttacattcataataatttcaaagcaaacgtaacaaaacttatacagcatcaaattttcttaactatcactgtgataaaataccatggccaaggcaactgaaaagaaagtgattaatttggcttaggtccatgatgatgaagcaaagcaacagatgagagctcacatcttgatccccaactacaactggaactttcagatatctttcgaaacctcaaacctacctctagtgatgtaagccttaatctttcttaaacagttccaccaactaggagccaagaattgaaatatatgtgagcctatagggtcattctcattagagccatcacatcatagaaattctagctgaattttacctcataacccattgttgaacactagataagctctaggcttctcaccacctgtcaaactattttcttttataatataatacctcccttgctgccaagtgtctcatttccttacaactttgaactgacaagagacaagtgatatctttacttgtaggaccacaagcaaggtatgatgattagtttttattgtcaatttgatacaacctagagtcatggaggaagagggaactgcaactgaagaactgtctagattagcctggactgtgggcatgtccgtggagcatttcctcaactgctgagagatgtaggagggcacagcctactctggagcacaccatcgctaggcagacaggcataggcagtatatgaaaggtagttgagcaagccagtaagttgtgttcctacatgggttctgctttacttcctgactccaggctcctgtcttaagctcctgctatgaattctctccgtgacagagtgtagcctgtaagtgaaataaatccattcttccctgagttgcttttactcattgcgcatatcacagcaacagaaaaccaagccagaagatggcattttcatttatgttatgcattcatttgacaaagtatggaaagttcctagtagtgtgaggatttacaaacattccaaagtcaattctcagtctctctctctctctctctctctctctctctctctctctctagttatgtggactaactaatggtagatctctagtggttttcactttatcttttctttttaagtttactgataatattccggcattattttgacccaccctctgtcaactgacaggatatatacccagcattcagtcagatatttggccagctcaagggccctgcaaccaaagtagatacatcatgcattgggcagctatatcatgctttgcatggctgcataaggactctgtacacatgtgcaagctttctcttttaagcaagcactagctgcctgatcctcccttcactttctctccagattggctgacaccaacttcccctatcccctttccccccttcctaataaactcacacacctgggttttgttgggttctgtgattcattactcaccactgttgctgcagcaaaacaacaattatatacttccctttcttttaaagaatgtagaccatgctgggcgttggtggcgcacgccttcaatctcaacactcaagaggcagaggcaggcgcatctctgtgagttcaaggccagcttggtctccagagccagtgccaggagaggctccaaagctacacagagaaaccctgtcttgaaaaaccaaaaaaaaaaaaatgtagaccatggtgtaagaggcttattctcagacttacaactgctactcaaaatggtcagtgcattgaaagatgctactcaaattactgttctaaactacaacagaaaagctcaccatgtaagtatgttaacaaaagataaagactttaattatagccctttagtaaaattgtaggacatagcagctcccaggttttcttggaaaatggcaagagaaagaaaagagacagtgatgagatcagtgccagcattgcagggagggagagtctgcaaacttacaaagtctcagaacctaaaagagcagaaggggtggattagataaattctaggatggcacctggtactctgaccagagaccaagggtgtttcatatatagacactgcttttatcaagtctgcttttcatggaatcttttacaatgaaaatcctcaccccacatactagaaactcacaaagcataaagccatattaccaagcatgttgtaggttaaagattgcctacacactaacttaaggcatccatagactaccccttaggtttgaatcactgtaaaaactcagctttataacaagattttatagtacagtcttagacttttttacttcaatatctatgtgtaaattccattaacattaatgtgcagatttatatattctcaataaagggtgtgtatttccaggtttcattgaaataagaatatccaatagccactatttttttactaggcaaggtagactttgaagaataacataaaattattttgattttaaaagtataatgtttatttactatccttcgttgagaaaacacagcgcttaagaaacttcacacaatacatagtaattacttgatgctcttaacaacaagtgcagatgcttcttaggcttaactatgctataaaatacagaggacagtgcatgacaaatagcatagccaattgaaattgaagaaataatcttccaacatagaatgtaagccatataacagcattccaatgttgagtattttcaggagcaatggcgagaggtgctaagctataaaacagtggaaccctggaaaggggcctatgggctgacacattcagatactgtctgtccctcccccagcctttgttttgttctcaacacatctcaagcctcgcttgccttttgagtggggatttagtcagatctaggattataagagggattgttttgctaaaagcttcataagcaattgaaaaacaccaccttccctcctcccctgccccccaagatacatagttttgaatgaccccaggttgcctcagaaaagaaaatgtgtgattatctgataactgaaaatattattgaattttattactttaattataaaagtcataaaacgaactgcatatgcaataaaaacagattacacaacacatacctgttttcagattgactcaggactatttatggagtggcttggccttagcaatgactaaaatcagatttgaatgctattataaataggcacagactgttcttatgtaacttgtatttatatttatcaataaaagccgtgacttaaagcttgcagtaataaatttgtggggaaagcatggaaaatttattatctctgatcccttctttatctcttcctattatatctgggacaactgtagtacttaggtgatgtgactgaatcttcgtggagagcttttctattttaagcacaaatcatgcattagaaaactccaaagtaaaaaaaattaacatagcaaatgtcaggaaattaagcaaattaaatgatactgtcaatagcaggcaacactgtcaaaggactaataagtgcagttaaataggatcaggaatgggtaatagagctttgaaagtagataagaaggcaatagagacatttaatatcaaggcataaaaaatatgtcgagcacagtaggtattatattaagccatcagacttttgattattattttacctcttgggtagctgacacaagtaaaaatctgtgaggtgttccaagtattaatttgcatcggtgttaaatatcatttataactggtgctagtgtaaggaagattcgtgtcccaattaatgcatttatataatttcaaaacaagcttatttccaaaaatgcaaactacaaaaactgttcatgacatataatcttttaaagcaggcttgctatgcttaattttaaactattatttctcttttcataaatgttcatttgccaggtatcaagtgataagtttgtgaattctgttgtaattaagctacaaagtcataaaagtcataaatgggggtagggggtgagttaacttcatgttattttagaaaagtaacatttatatgataaaaatattatttcctttgttcttctcatgaaatcttgatgttattaaagtggctagaagagaacactttggagtacatattgaattcctcactttcataatgaagatgtggtcctttgtaatctaaaaataattcaaagctatcgaaatagaagtaatattctactatgtctgttttgttctctcttattcacatttaacaagttgtagtatctttcataacaaaactcacaaaagatttacaattagatgtccaaggtaaattagtcaagtttgccttatgtcatttaaacgggacatatttttcatagtaactactttgaaaattactgtctcctcaaaaagacttacacctctgtcaagagaacttctgaagcagtggccgtttcataaactgcatgttattcaagttaagatgacgaaaatgacaggtatagtgggagaagaaagaaggagcatggtagaagaaagaagcctactcactgcctctgtactctctgtcccaaatatagaagtctaataagaacagataatctcctgcaatatgtaactttcagtcatttcctgggaacccaggagtggacctggctggtctgtaatcttagccagtatggaattaatgcctgcttcaaatttgggtcaaaattgtggaactgatttttctcttgaaaatttcaggattaacactgtaaggggtaaagttaacctatgagctctacttgcccaaggacatataacttactggaatgctaggggctgttcatgtaagataatgattaatgtgcttttaaacagggttggttgcccaactgcacaggatgtgcttgattacatgcaggtgggaggtacaataggcaggaagtatgtcaggatgtatgcttgaccccagtgggatgaaggcagaaagtacaatagcctgtgggtcctgcctttaggagcacccgactaacatgactcagcagcatcctctaggaatcctggatatgaactttcttggcagtgttaaataaagccgactttaattagacaatcatggatttggtctttctcttcaatttctcagatttaatgttacacatcatattgaatggtgacactactatgataacattcaccgagctcctgatttgtgttgtttttctaatatgaagactgattagcaattatttatttatccactctcaccatgactctcttatgccactaggatgaactaagctgacaaagaaggaggatggtcatctacacttcattgaggcttctgcatcacttagaaagtcaagatctgagacctcacccagggataaaagtactggatctactttaaagctcaaacttgcatggccaaaagaaacaagaaagcatgatggcatggaaaactacagcagctgcaatatttttgaagtaggacactcagaaaagggcacaggctattgatgtttctggaaacatcatatttaattcctctgtgaaagatttagcggtttagtgaaaagatgcagctaaaggaaaaaaaaacacacactctgaaagaagagttgtgaaagaaaatttgcttaaactaatattagaaagaaaataattcagaaatagttgcctctaataatctacaatcccaaggctagaagaaaaggtcatagctaattggtacaaaagcagctctggatacttaggaagtggtacccggtgatgagtttcaccaaaatacttccctttacctgtaattatgccaggacacatattacaaattatagggcccagaaaagaaggcagaaaatgccacacttcaaaactgaatttcttttctgtttaatgctttttaaagtcacaattaacttttgtaatctgataaagtaggaggtcaaatgctatcaatggtagagaacagaagtgaagcaataaacttacatcatgcattataaaaatatttcttacataatttcatttaatacaatcataatcaaagacagtacttttccagcaccatgctagtttaagtaaataggtaatacacactgcagaatctcactataaccaaaattagcctttacattaaaaaggggaggaggaggagaagaacaagaaacaaaaagctatatattttctaaatatcagaaaaatctgaacatattaattatcttataaggggcctaatttttacaaattttgttttatatacctagtaataaagacttctctttagaatagaacataattatgacctgtcccagtaggcgtttattttatttggatgacttgtgagagacaaaagtaaaataataaatctacccacttgctcactgaaatctagaacttctttcttttcacagaacacaggagtatctgccaacctataaatgaatgtatgctctgaacagacactttcttttatgagggtcgtgtgcatgtgtgtatgtgtgtgtgtgtgtgtgtgatgtttagagggtaaaatatctagccattatataattgtccataataatcatggatataatagtacaaaattatgattactaacaagataccctacttctactagcatttctagtagtaataaggtcaaaatacaaagccaagaattttgttcaggaattcattttattcatttcaaacaccgttgccttcttcctgccacccaaatcaggactattttgcaggaagtaagagataatttatttgaaacaatatgtattgtcattctcacctctctcctcaaggacataatggcaagacttgagacaaataaaactggctccaagcagcaaacaatgctagcataactaaattcccctgtttttcctatttttttaaacccaaggtcattgtatggaatatcgggttaaaaaaatggagaggaggaatggttttgtgaaagacagagcatgaaagtagcagaaatgttctatggaagcatctgagaagaaggctagtgctgtgcaagagcctcaagagtgcaaagcagaggaagcataaagaatagaatatgtaagcatgacaataatgcataatacagagtgctgggcagacagcattcgacttgactgtaatgctttctctgtgccttgcatctttactaggaagtttccattctaaataagacatgcaaattgatcaatactatttgtggcaactgaaaaaaatgttcaaattgcaagatgggatcattagccttttcatgtgtccttcttagtccatatcacacttgaattcaatattttattatttctattagtttcctaaaatctcactgtgttgaaattgtatttctaaagttattttctcttttggcccattattcactaatctgttatgttccatcactaagtatgagcatctcctgtgtcttccatgtgaggctcttaagaccattaattgagtcttttaatgtttgctattggcaaatgagagttaatttaaggggctggggtgggctcaacagttaagagcactggctattcttctagaggaccaagattcaattccgaacacccacatggcagctcaccattgtttgtaactccagttccaggggagtctacactctcacacagacatacaggcaaaacaccattacacataaaaaataaaatgaaaaaaagttaatttaaatttgcacaaaaataagaatctacacatacacagtaggaattttaagtcttttttttcttctcatctattgatatgctgaccaagttatatatgaaatatcatgtatgagacaccttcattttcatgatactatcacttaagatatcactgatatacataattgacatgctttctgaagcatatgtaaaatcaatattgtattatccatatagaattatactgctgaactacaggcaagttccacgtatttggagacaatctatcaatcactttatgagaaacaaaagtattgtttataatttttcaatgcataagaaatacatgcaaggtagtattaactttcctaacaactatatgaaatccttatactttgtttggttttttcctttctttgtgtccagaatgtaccttgccttcctgaaagcactgcagagttgtaaataatgtatgaaaaaagttccttgttcactgcccagagagtactatgctgcttgcctatagtgtaccacatctatgctagacaaacaacaaaacaggccactaaatctgaaatctcaagttaagatcttcccaagtgaaaagggaaaataccatcttagatttcagaaggccttcaaacaaacagttgaaatccttggcatgctcccacccagcagattaaaagcactgaaacttcagaaagggctgttcttctgagtaatttagtgagagcgtagaaagcagaattaatcacttaatgtcatctcaacaggctccctatttctgaagcttccttcttgctcttagagggcagattgacaaaaacagatgggggaagatggtaaagctgaaacaaaaggctctaactgtcattccagttttcattttgtcttctgatggtatttaggaattttgcggaacaaaatgtgatttgaggataacaaacaggtggaagtcaagttcaagcacaacagatataagagtaatggtgtatagttagattcagctttttaaaaagatagaaagaacatcactgtttttcttcacttgtcaagattaaacattactgaaaagaaaggtcatatgacggtaccatacagaggagacattcaagttcccctataaaataaattctgctttcatagaattccattcataatgatgtagacttatatttctatttccttcgtgcctaaattccaaacttcagaaagagctttaggtacagtgaagagactttctggtgggttcaaaatttcttattactgtgaaggattcaacaagcagttatcaagagcatatatcacaatgagtttgccagtacaggctaaaagtatatttccatcgtttaaagcaaaatatgactatactccttgcagcaatttttaccacatagcatcatctctatctaaaagaaagttcacaccagccataaccttaaaagctttcctcagatatgcatggaaacacaggacggtattcctagcattacagaatttaaagcagaatgtttaggacttgttatacaggaagaccttgtgccaaacgaaacaaaacagaagagaacaagccaaaccaaaccaaaccagacagagatgagcccataatcagggcgactgattttagaataattttttaaatatttggttttctagaggttttaggtgctcagtctgaagaaaactttgtcagtgtttgtagttgcatttacaactgcttaaactatattgatttcatatatatccaactatttatttccaaagaaaaagtttataaataagctggtcatcctgtgtgtttagttcctcagtgttagtctgactacgaattgttgacatggatacaaaactaccaagagaaatttactgctgcataatttcttgtcctaatttctcccatacttcaatatctaaagaatgcctgctatatccatattttcatacaaatcatgttgcattgaccttatctcctactgtcttaaagagatcaacaatgaagaaatattcagcatagatgattgtattgcattagaacagacaagcagagaatgattgaaatttcttcagagaacatcatcagtgcttgctttgaacagttctgcatgtaaatcaggcaaaaatggtcggtgctcaacttgtttctctagtggtcaaaggatgatcaaaaacagacaacacagtaatgctctatttctaccatcattaatgcaaacctaaatcttattaatcaatacatatatgctctaaaagtaacatgtagttttcattgagaaatgaaataaaatgaaactaagcaaagcaaatattatacaatgaatatcagtatacatttcatcttgtgatttacatggactgctaaaaatcaatcttaagtacttggacttaaaaattaacagcattttggaactcattgcaatatgaaatctatcctgtctcaaatccccaccccatccctgccatgccccttcaacacattctaaaatgatttttaaggtttaaggttaccaataaacttctgatagttaaattattatataaaaaattagtgggatgtttctatagtttagtatggtttcaaactcactgttatgatttaaaactgaagtgtctccacaggctcagtccctatcttgtgttatgtactccaagagcctaacccttctggttggttcctagtacctaagtactaaatgttatttggatgaatggtatacttttgtttccttggttgttgttgtctcagggtttctaatgctacattgaacaccatgacaaaaaagcaagttggggaggaaaaggtttattcatcttctgcttccacattgctattcatcactgaaggaagacagggcataaactcaaacagggcaggaacgtgaaggcaggaattgatgcataggccatggaggggtgctgcttactggcttgctcacatcaattgcacagcctgcttcttatagaaccaaggattatcagcccatggatggcaccacccaccataggttgggccctcctccattggtcactaattgagaaaatgccttacggctggttctcagagaaaatgctttatagctggaactcatggagacatttactcaactgaggcttcttcctctctgatgactctaacttgtgtcaagttgacaaaaatcagctagtacagttgtacttttatttatcagaatttcaatgtgaagtacaaataatgaactctgatagcatgtagacacttaaaagtttacacagagagatggtgatgaaatgactgtctcctacgtgttgggaggcatttctctcagccttctgccatacagtattgattataaacatacaaacacagattttttttaaaaaaaattctttttttccagttttacaaaactgttaaagggcatctttaatgattttatcttcatgaagcagtctcaccttccaatcagaacaattttctcctctcaatcaaaccttcacattcagctaatctttataagccttccttgaagggcaaacatggaatattaactattacccaaacaagaaatttacccaaatgggaaaacgatgaacataacttaaagggcttcagctatgaatttcactattgcccaaagcttttatgaacaactcagcattgagtactgtactttctctcaattggttgaatttcagtggctaccaatttctattccactagcatacaataattttaagttcaaacacagaataatttggggtagtatagactagtgaactcaaattataccaatttatattaagtagcatttatatatctaatattaatttttctttttttttcattacttgcccaaaagctttatagctcatgaagggaattcaaaattaatatacctactttatctttttctagatcaagaaagatatgaagggaacatatgatgatgtgatcatcttggagggagtgatcagacaaactgattcggattaccctcagaggagttattattctccctacccatactgtctgaacagagagagaaggatgacagtctagttccacttgtcttgtttcatttatgtatctccccactgagaccagtttcctagcattactttatctgttgttaataaaatacaaaaggaaataaaaacaacaacaataccactaccaaaaaaaccccacccaggttaatccagtactttctgatttttgaggatcacggtgattgtcccgttattaaaaatagtgaaaaccaaaaatgaactgtagaaacaagctaattacatttatggtttttaatcaccttctacccaagcctcatgctcataaaacaacaattaaaatatttaatattaaacacagtgagagtccttatttctgagtttttcaaaacttggttattttaagatacacttatagggttaaaacttgcaaactttttacacttggggcttacataaattccacacaccaaccgagatcagctgagaaaaaacatcttcctgagaaagtttagtcttcctgttttagaagagggacttggcatagaacattcccatttaccaggctatgacagcaagactgtgtcttacctggattccttggaattcgctttcttcggtctctaaatgctgcacctgattgtagggcttccagaagattatccatcactccggtctcatcaccctctggaggaccagagaaatcagaattaatcttatggcaattaaagttaaactacaggaaaataaagggaaaaactcctgtcagatttacataatacccttaaattaaagacatatatctgttttaacataatgggtcctgtcagtttctggcatcacagactactttgcttattacgcaccattaagcaaaattcatgccaatcccactgttctttcaacttaaagaccttgtcttttgtattattgatgacacactcagtatgcaaataaacagtagctgatcagctactgcagccttcctgttaagattcttctaagatattcctaagcaagaaactactgacctggcttaatgcaatcaatgtgcagggcgtgatttgatgaagcagaggtacacaaggttaaatactgattgtattaataccttcagcattcaaccatcatctgcgattatctcaaaaggcactatttgcaaaacacatttgcattcaattcttatctaatccatatcctttattcattttgaaatgctgacattctataaagaaaaggtgaccacatcatctgaaaggccacattttatattgagagacatcagccaaaaagtcttctttgctgtttagaatgctggtgtgtgcctaaaggcttttcttacgggcaagaactattagaaatgagaatggcaggtactcagagatgctgatggaattccctaacagagacaacatttaagactttacaccttactcttacctttgacaactctggccatcaagcacactcctgatattcgtaacaggatttataataaagtgtcaattgacaggactgttacagggacctgcgctttctcatgccaaattgtctaactgctggaaagaaccctcactaggtgggtactttgagctaacagtatagggtctagagtatgggttttgtaggcaggaaggtaagaaaaggtgaggaagaggtgagggagagaatactgtctcccattccagtccaaggttaaacttaaatcctactttgccttaagcaggcagtattacattataggacaatttctcttataggataagaagaagctaaaatcactatgcacttcatttgacttgaaatgttataattatttatccttttaaggtatgctacctaggacaggatattgagtaaaaatgggaagaaaacacagaggttttcagagccaatatcttgtgaaagtgtaatggagggagtgtccacagtgattagagaaagacagctgcgctttttaaacattaagatcaatgacctatttggatcatcacacaatatttccaaaagaaagaaaagagcaacaaagtagttaaatagttccgtatagatgcaatgtggctgggataattaaatctcatgtataagatgctttaaatttcatataccttttcagataggaataagaaaaccaagacaccaagcagatggtatgtaaagggatctaaacatgaaccccaaatcattcatattaaagaaaacatatttaaaaataatgatatgtttgacatacttttatcaggctgagtgttagaaatctagtgcatatgtacttttttacacttttccggaattcaggtgttcaacagcacatatatcatgtggacaccatattgggcagcacaattaaaacaatgggaatccattgctcaaacttgagttttagagaggcttgccaaagagaaatgtggaaaaccaggaggcagaaaaatgtctaagaacataatttatttgtctaagtaacaaaaaaattgaaattatcaacataatcactaagactcggccagggacagagaaggctaagcaggaaatgagtgtggatgaatagtaataattaggcttaagaaaatctgaggagctatgtgaaatgctccaggaatgtccccagttgtgtgtatgtggaagggtgaatgtgtgcacgccacagcacacatatgaaagccagaacagaacttcaagtgtcaatctttcaacaatattagagacaaattctctttgtcgtcgttgtgtgtttctcccatgatcctatttaacaggagatttgctggtactagagctttgagagatttgcctatcatctcttcttctcacctcagcagaggaattctgggattatagatatttaatttactgtggatggctttgacataggttctggggattccaactcaggtctgctcactttccctttcacagaaagtacttctatccacaaagtgctctcctcaaaagtcagggaaaggagaaggataaaggtgggcaagaaatgttcacagctaaagaacaaataagagagtaacaatgcaagtgaaattcatgtggtcttgtgaaatggtaattataaagacagtatagacgagtatgtgtaaacaagtgaacagaaagaatacaaaatggcatctatttatggcttctataaattaaattaaaacatgaaattatatttatagatattgtttcattgaaattctttaatggtatatttgattagactaaaaatgtggagcataaacacaaagatggcaaaaataaatcctactacttaatttagttgtatgccacctgacaacatttattgaaatattaccttatagtatctttcttatctgtttctcattatttttccctccctgatttgtgggacatttttatacatattttccccaatgttcacccctctaaaatgtaaagtcatggaactattgcttatctattcatgttatctactgtttgttaatctgtgccacaaaccattgtgttaccaaagatttatatcatggtgcttctaaaccaggaactgaaacagcaagaacagttctttacaaacattttgcacgtatcaattggaagaaatgacatttcttcagttcattacagtttcatttgttccatgctaattttaaaaccaattttcatagactgtctatccttcacagatctaagttttacaaatataaccaattgacattgcttcctaaacccaaatggaagccaatatggtcacttaaatatattacctttcattttgaatgaatttcagttaagtttgctctgtgatttaattgtgtaaacttaacagttcacttagaattcaccacttcatataaccatggtttcttatttatatgtaattggtggtaatattttattgtatatggagttaactcagaaaaatgtgttcctttttattgtaaatgaaagtattaaacacacaaaattgcttctaaaaataacttacagtggctattttactgagtaaaggaatatcaagagataattttctaatgtttttagccattaaaatgattctatgtgggcatggctgagaagtaacgtttcatagttcactttataaaaatcatcacacagttagtttcagagaatagcaaggagctcggtgggctgcatacagtttcaggactctatgagtagcttatcatctgataaactcaaaggcctggctgacaccttctgtttcatgtttcccatggtatttgtcactcagtggatggtaaagctcagtttttagcactaaagataacctatttggtattgagttatttcccccaaagtgtttggagatgctaaagattaaaataaacacttggtaaattaatattctctgctatacttttgtgcaaaactattccctgatggctagcacatacttatgtgagagaattctctatgggcttctcacaattttacacatttttaaagcctatttttatagcaatagttttacatgacacggagcttccatctaaagtaaatggtaggtttgtctgttttaaaaacaaattatgtgttcctccagggcaaatgctatgtagctttgctttgagtccatcataatatattagggattttctaagattagggctcctctggagtgctacaaacccactgtctgtgtaacatccatctggcagcacctttgttcccctctattgaagctggagagcaaggaaaagaattaagaacatgagaacacgtatctcacactacttactatactatgtgtagcctatgtacactgtgtgtatttctgacctctgtaccttctaacaacatccattaagttgtagcatgctaatttattagctacaccacttttgaaacgattcttattctctgtttttgttcttgtatcaaacattgttaattagaaaactccttttgtatctagtaactgaacagcatcttgggcactttcattattgaagactgtactgcagttcactgggcttgagaattactaacttaaacataacacaagttcaatgtagtttatcttaaatgcttaggaacaggtgttttgggtttcacagtctgttggattttataatatttgcatacagtttatcagttgagcatacctaatccaaggcccaatcttttcaaaagtttccaatttgggagcagtacagattaaggatgtcatttcctagaatcttaaaaacctgatcataatggattcattgttgcttcgtcaaattttcaattttataattaaagatctctgtcaaaactgaagaaagctgctagcaactagtaacaagtaggcccccccaaaaaaacaaatgcttcttgctgaggtaggacccttctatgtgacataatacctgcatatattaattttaaaacttaaagtatacattatatgaactagaagggcagggaaagacataatgaatgaaaagggcctaaaccaagcctccaaaaacattaaatatctgtagtaatttaggtattatagttatatgtaaatgaaacagaaatagaaccaaaccaccaaaaataacaaccagttcaaagacagtcaaatcttgagtgcaacttagtacatatgtgtgtatgtgtgcccattctctctttctgtatacaatgcaagtgtaaaaactcacaaatactgaaatgcacagatcttaggtgtacagtttgaactgttacagattgatatacccatgtaactaccaccatactaagacacaatcactttccctttcttatccctaccaccaaggcaaacctctgatactagttttgactgtcatctgatattagttttgacggtccttattatatactttaaaagagtgttttaagatgggtggtggtggtgcactctactattcccagcacttgggaggcagaggcacttcgaacccatcctggtctacaagtcgagttccaggacagccagggctacacagagaaatcctgtctggaacaaacaaacaaataaaccaaagtttattttagtatttattttacatgtatggccattttgcctgtgtgtctgtaccatgtgttgtgtctggtgctcatgcaggccagaagagagtaatggatctgcaggaactgtagtttcagatggttgtgaatcaccacataggtgctggtgatcatactcaggttttctggaagagcagcaaatactcttaactgctgagtcatcaattcagccacttttcatataatttttatggtgcttgggtttgaaacctggaccttgtgcttattgagcaagcactctaccactgaactacatccctagttccaaaccatacattcctctgtgagtaaaagagtagagatcattttgaatcggcatagtcacttgaaagaaagcaagcatgccctatcaaaaggcatgagggggaaagttgaagatccccatttacaatgggatggaaatgatcagagcatagatctaaacaggtttcattaacacagtaagaagattccaaaggtgccaagtaactctgaaaatccatggttagattttcagtaacacaggaatgcgatgagggtgacattcaagatcagcctcacagcagcatgcaaaacagaccagcttgggagagaaatcaattgtattgttaaaaaagaacagaatttaatccacaatgacaaatactgttctgcatacaagcctggaccaagctcgtccatttggacacttttgggcaaggcctaaggagaaaagtcaaattggttttgtgaacaaggtcatcggcagaagtaaatggaagctgacagcattagaaggcaatgacaaagtggagggcaagaaaaatcagtgttggattcaatctttctcacataatctatcaaggtctggattaagaacatgtgcaagatgtatggatttgcacatgacatggaattagaagactgctcacttatcaaaaagaaggaaacaaaatcccttctcaggaatctacaaaaaaaaaaaaatgaaggccctgggctgataaatggatcttacaattgaacgtggaaaaacaggaggaaataagggccaactaggaggcccatgcaatatggtaccaatagcataccatgctgcaaacactaatatctctggataagtgtaacatgagagagtcagaaaaaagagaaatgaaacctcaaagcacttactccacagatgtaacagaagcctgaacaacatgttttgtagtccacagcacctagaacgcccgtatctgatggcaggttttgttagtttgtggtttaattggaatggagttaacagtgatttggaaacaccaacagatggtcactaaaataatggtctatgaagtccttcacaaccagagagtgtggtaaaaagaatcacaatgttattccaaggagattaaaaataaggtataaatagaaagcacagtgatctaagaaaagtgatgaaggcagaggctcctgtttaatagaagaaaaacatgcaagtgagaaaaaaggacataggagcttagaagaaatcactaccaaccctgagctgagctggggctgtgcaacgattatactaagcagtaactaatatttgttggcctcccaggtaatagccttttggagaagaaaaaaaaagcagcatcaaactcctgcaattaaagttaaaagtattcttggaaaatgttctatagacttcactcattttgttagcttatctcattgtcagaacaggtatccaacaggtttcccacaatgaaataaaccacagagtccacataaacttcaaagtgtatagcactccttctaaataatttcaacttaaggttactgttttagtttcttatagtcatggagtaaatttttggggggtgggggatggatgtcataagataagtagacattaggctccaaactcatgaatgatgaatggttaattgatttttccccaaaatacctacatgttgtgtgctatgtaagagtttatcagggaaatcgagttggagaattaaatggtgcctgatgtatttgcatcttaaatagaagcttgttaacacaaatgaatggatttctaatggcagactttctgtggaggaactttttggccagaggtatatttctggcagcttgccctgaggtaagagagcttaatagcatatagtagttaaaaataatgtttatgcttattcatttctttccttcagttacctatatgctagaagattgggagttgaaaaatatgcattctataaataaacaaacgcccaataaacctggatgtttacatttaccagaaaaaccactgttgatgctactggtaaaatattgcacattcaattattttaaataattaatatttcaaagagatctttgaaatactccttgtgttttatcagaatcaatcattcactaagggcataaaacactggtgaaaggaaaagcaaggaaagcgaatctttcagataagacaagggtattttgggagggggaggaatattggtaacatctagcatttattgagagccttgtatattccaggtgatataaatccagtttatatcaaatcctatttagttttccaggcaaagaaactgaagcaagcatagataaattaacttgctccagttcacagaactggaaactgccagacagaaccaataaaagaacacagaaatgccttgtgtagggacgaaccatagctctggtggctataactatcatcacaagattcttacaattcacatgttaaaaacaattctcatatctcgcatggcttttaaaagtaaagaagatatcctatgctacgtaacaatgttaacaattcaaatttcagtcccaagtcctatggaaacacagccactctcattcattttgcatcatttatggtggcttcgttgctataagaacagattttagttgtgacatggactttgtggcctgtgaaatataaaatatttatcagtcagctctttatagaggaaggttgcccatgcttgctctagagcacatgttgtcaatgtaaacactatatggatcttcaaatttgcttctgagttgttgaaggaccttggtgagggccagtcaaataaagcaggttttaccatacaggaacgtaactgagaacatcagcattcaatataaggattgagatgcttcctatttcagtgcagagccaagcatgagacagctatgaagtagcaatacatacatacatacacacacacacacacacacacacacacacacacacacacacacacacacacacacatccttttcctgtctttatctactgatgcacactacaatattaaattgtgctcacatataccagaagtgcctgccttccactcctttactgaggcaagaggcccaggcatccctttatgctttgtgctcctctgatagtttcaaatatgacagcattagaaggcaataagacacaggttgttttcttatttgaagacagccatctagctacaaggtaaaatgcatgtaagttatagtttggattaacagtctcttctttcctcagtttgtcctttctctgtgtggcatagatggctgagggactaaaggacacaaagtcttgtatagagactttacatttaaaactccttccaagttttcccctgctattagagaaccctttctctcactgatgctaagcactttcaattgacctatataatttcttacctatcaaatacaataaggtataataaacgtcatcatttttatatgaaaaccaaacacaggactaataatgagacagaggaaacagacagaagggttaattagggcatccagagcataaacttgaggccaaatgcacttgttacaacagcacaagtgtggagtggaaatgactgcaaaaactgccattgtgagagtgtacccaggcagttgtcataaatgtcctgcatccagtggtaaaggtagtccaaccaccaagtataaaaatgttgtaaaagggaactacacctcttaatggctgatggttggcatgcaagaaacagtggacaatccatcagctgtcaatctaacttccaaattgtagcattcttctcttgcttatcagattctataatgaatcaactttcccaccaacttccagcgcaattgcagaaaagcaattaataacttcactgttgctactagcatatatttctcttcactccacagttttgcatagcaacttaagtgatacttatcttttaaaagcaggacgttcatgcgcatatgatatttccttttttacataaattaatcttggaaaaaatggtgtgttgcaagagtaagaaggttgtcacacacatgccatggcacacttttagagttcagaggacatctttccagagtagattctcacattccaacttgttgaggcagggtttctcttagttctgttgctatgctccataatacagctagctgcccactcccaatcttgccttaaagtgctggccactaattctggctctttaagttggttctggggatcaacctgagctcacatatctagtactttatcctctgagccacctctctggatcctgtatttttctgaccatttcagctggagagtgcacactgatgcattctttttacatttccaattcattaacatactgaacatttttaaatgtagtttttattagccttggcagtcctggaatttggtctgtagaccaagctggccttgaactcacagagatctgcttgcctatgccttctgagtgctatgattaaaggtgtgcaaaaccattgaccagtttagcacctgtattgttattaccaaataaatgcaatttggcacctttctttgttattcagatacaacaacatactctagatgtgcatctagttgactgggccagtgaacctttgccagaaactcagaattaccatcttttatttttttaaagattatgcatatgtgtgtgcttctgtttgtaggttggtacttgtgagtgcatcaaaaaaaaggtggaggctagaggcctcagaacccctgaatgtgaagaaatctgacatggctgctggactgaactaaggccctcggcaagaacagtaatacttgctttactgctgagccacttctccagacccaataccagacattttaatacaagataatacagaattttctcttttaaaaagcaaaatcagtttgggggaaaaatcaagcaaaaacaaaacccatgcatagccacatgatttactaaaaactctcacttaagaatggacataaacacaaaactggtttgtttgtttcattggttggtttatgtttttgccatcactgcttctagacatgggacaccaaatttatcttcctagtgattttggtttgtagtttctgtattaatcttatatgtactccaaagagtattattcactaactattgcttaattatttggatatgggttcctgaaggagccccactcacactacccttccttcttactcctgaagagaaagaggagagagaaaagagggaatatctaccatttaaatgactactgctttaacctttattttttggaaaatgattcagtcagtataaggatctgtgcaggagtaaggagaacaggaaatagttctgagcagtttcatggtcaagtgtcacagtgaactgatacatcattcaatatgcaaccaagactctccctccaagtacaacagtcctattgattcactcctgttatcactttaatgttttgttgttgttattcctgttgtattaaaataggggccatataggcattccaggaacttgagtgatagaattacgggcaggtgtcatcaaatcaagctaaataaatactattttctttctttttgcagtggtgggcatcaaacgtagagcctttcatagttctaataagccttgtgctacctctccagccctttaattcagtatctttgatgtcgattcttatctacccatatattctacacatgtgcaccactgctaacatttacttttattatctctctagtgacttgctatcacttcatctttgtgtctttgagtctacagccacctatgacacacacacacacacacacacacacacacacacacacacacacacacacacaaaaaagaaaaaaannnnnnnnnnnnnnnnnnnnnnnacacacacacacacacacacacacacacacacacacacacacacacacacacacaaagggaagacaaattgattgaaaggtggtgaaaatgattttaggaaaactgttcactttgagctattacttacaggcctaataccttatggatagctgtcttcttgccccatttgaaaatatcagaggaacacaaagcatgcatatcaaagcataaaaggctgcctgggcctcttgcctcagtaaaggagctgaagatagacacttctaacacacacacacacacacacacacacacacacacacacacacagcccttcgatggtggagatacctacacttacatttacacaatgaactctctttcctttgaaggcccaaattaccagttatttcccaatactctcattcacaaattttcacattatctaagatttagcacgtctaaatcttatttaatcatgaggaattatttaccacaccccttaattactttttatcccaattgtttcatttctcttttgtccccagacctggaatctgtggatgttctcttacatttttttattcatcttcaaaatctgtgagaaatttataccgaaactttccctgtagaatgtctcaaataagcatagctttcttaactgaatcagtcatttcttaaccaagatcattactacttgaaaacaacaacagcaacaacaaaaacaaaaccaaacttgctgaatttcatgattgaagtgtaagcctttcctaagagtcagtgcttatcagacgtgttctaaaacataacagaaaataaaatcactttttatttttccttggtttctgctatgctatttttgtttattatttagtatttatcttgagtggtcttatctttgtacattcccttgtgcatctcatttaagaaatgaaagattaaaccagattctttatacttaggagtttaaatgtgtatacatttaaaaagattagtatgtgaatatatttgagtttatcagacctatgtaagagtacacattttggaaacatatataaaggtaattgacaagttaaataaatatattaaccatagtacattttattaaataatttaaattcagagaggcattaattatatacctcacaaaaataaaagggaatttagtatacaataagaaataattaattttaggataaataaataaaccccctaaggcagaactcagaataaattttaaatacctctattactatttaatttaatctaactgttgaattttaaaagagaatacattaaaagtaatgtggtaagtgtatattagaccttttggtgttttaaataatcaaggcaaaaagaagtaaccccttcagtactttacagtttttacttggtgaaaaaagtagtctttctggcttcaagatttctaaaattaaattcttcactgtccatgaacacagacagggcaatataacataagatagttccttagagaaaagtctataattagacattagtgagcaaagactatgggtgccattgagttatatgagttgattggttaaaagaaaatggtagagaactacaaaattaggcaccaacaccttggctatataatcatgtcaatttctgaacattttgtgcattttttaaaacaaagtcataggtaatattattgtttaaataccccactaaaacctagtgaaaccagagaaaatgctggcatttaaagattatcattccttagaatttaacatcacaaaagcccgagggtgaaaagtttatttgatctttgtatcactttgattttaattcaggaactcccatggcttccatcccattccatgctataaagcaactatgtcctggcatctgtttgtagactaggctggcctaaaactcacagaaatatgcctggctctgcctccccagtgctgggattaaaggcatgtgccaccatcacctggttccataaatatctttataccgcatcacaatgaatatgcctgtatagtcaggtagtgttttgaaaaaaaacattatttatgtatgtaggctttagactcagactggccttgaattcctcctgattctcctacatcacttcctaagtgcctggattacagacatatgccatcatgactgataaaaatgtgacctttttttggggggggggggcttgggactgactggaaaagatggctcttttaaaaacagttggctccagagaggacagcagagagagctgtgacaaggaagcactgcttcagtcaccattccctcagcatgttctttacgaagttgccattgactcttccaagataccagtgcagaaccattgggtaattactcactggacaataccaagtcaaacacagaactaactgtaagggtcctcctaaggttataggtgtttgctcccatgatgcagttcacattggaagggagtttgctttttatttgtttttattttttcttttaaattctttattcattttatatacccaccacataagttgaggcaggaccaagcccctcccccctgcatcaatgttgagcaaagcacctcaccacagggaatgtgtgccaaaatgtcagctcctgcaccagagataaatcctggtcctactgccaggggcctacaaacaggccaagccacacaactgtgatccacatgcagagggcctacttccttcccatgaatgttctccagctgtcagttcatagtgggctcctgcagctgtctctgtgagtttccccatcatgatcctgatccctcttccctctcttccactggactccaggagctcagctcagtgctaatttgtatttaatgaaaggtttcactggttaagctgagtaaaagtaaattcttcttagaatgtctctgcttattttatatgtaacatgtcatgagagaaaaatactgcatattaataattaatacttgccaactttctgattatactttaggcatggatcaagtacttgcaggagtcaagggtctaataagactgttgttttagtatggtccatatgttgataaaatagctcagactaagctacctaaaggagaaaactagtgactttattaaataaggtatcaaatactttacctggcttgcccactcaacagtaataacttttactatttataattagttttttaatcttcaaataacgtgctttaaaagctggcacttgccaaaagggtaggagtgaggaggataccaaaagctcttgcagatttaggtcaaggcaatagtgtcccttttacgatttgttcatctaagctcatcactaaagtctttgcatactatctgatctcattctggacgctttgtgtcctatttatagcctatatcaagagagggaaattgcagtccacggagaaatgataaggaccatttttcactcagagctctcatggcagctagtgatttttagtataggggaaatttatccccatccttccaaagaaatacactacttgtgctcttgtgacatgtgagattctgggtcttttataggactatggcttctatggtagggaaaagaagaaaagggatgcattatgatttctttaaaggaattactcaacccaggaggctttaaaagtttcactatgtttgttttagcaagtaagcatgcatattagcagtgccttcaacaaagaagtgagagtatgcttaaggaatctgttaattgctgaaatttggtgatattttcaagtttacgctgaattgggagggcaatgaaaaagatataactcctacatcagagtcaatcctggaatgattaagatgtgcttgatggattaatcattcattcagtcataaagtatgatttggatacttgtgctcaggtattcaaatattgctcgatctaattagaatgatcatagcatattcatttggaacaaagacaaaaacaataataaattaacaaacaatactgaatatttctctgaagaaatactgtacaaacagaagaaatatgtccatggaagaccaatatacctttaggtaactctctttgaaggtgtgtttcccagtgtggccttgcagtaacacgaagagagtctttttacttaaaagttcactttaaatgccaaaaatctgcagtggaattcttttaaatgtcaaatagcctataaatgatcaacaagggtagagcagattttgagcttcatccataaccaaaaatgattatggaatagtaggatgttccttttctactggagaattaggattttattagcttgaactatatgaagctggcatttttataggtcaaaagtggtcaaactgcagtaatttcatatggcttgaaataagatttagaagcacaattaagccaggtaagctattactaaacctctaagaaaatatttctaaacagcagagaagcaggcaaacacaaatgggagacagcacaatgtagaaagcaattctaaaatagtatcacttgaaaaacatgaacttctaacagttcttacaatccacaacaacaaactccatattttaagtctgcatgagttactaatgcaaccaccatgacaacaagatcacacagcaagccaaaacttggaacatcaccagctttctctttgagctattattttgatgatggagatgctgcccatttttacagatgttaattctttttgtttctttcccttttctaacttcagcatagggatacaaggcagcttatcttgtcattttaatgaaacatctttgaggtatgatttcactggggagagatttagaaatcaaagctttagcagggtttgtggaaataagttaatacagtactgagaaaaacacaatctccagaactcattttttccctcagcaagcattaatgaatgtcaaacctttatagattagttaatatacttagagatagaacatacttgtttatttttctgaaaccataattcagctagtacttccatgagagttgaataaataaatccaattattatagtggttttcagggaaaaattcagcaatatttgcaaaaaagtgaaatttgctgttttctactctatgtacataaaatattgacaactgttttaatattacctagcaatcaatatgcctgccacatttgcactcttattaattgcaattttatttttgtgcacttgaatttatcagataggagaacaaaccaaccaactcagttcaagcaaacatctaattacatttttcatgctctttgtcattttggtgagtctcctgtaaaagaacgtcagcatgacttttattaatgtcagagaatgcatttttttcttttgatagaagaagaaaagacctttcacattcagaattcaattttttctcctaacatttccaatgacacaaacatatggtaaataaaattattctaataaatattagagccagtggaccagtgagagagactctgagcatgctgtgaatatatcaaaaaccaaagtgaatctgaaatataaaaatcattgaacttttaagaaatactgaataattcaatagttttccataaaagaaaaaaaagaattgtaaacaataataatgattagtcgagctgcatctatgtatcagagagagcttggaaacctgatcagaaggtttccaagtttaacacactagttataaaagtctgcttttgctgggtgtctgcatcgtatacttttaatccagcactcaggaggtaggagcaagcagatcattcagtttgaggccagcttggtctacacagcaagtttcagtacagccagggctacaccctgtctcgaaaaaccataagataaaataaaataaaccaacaaaagtctgctttcactgatgtgagcagatccagaaacccacagccaaacattaggcaaaaatagagcccaaactggagatctccattgggtcttcccagctcagagctcgggggaatcctgtcgaagcactaggtcctctgcatatatgttatgattatgtagtttggtgttcttaaggaatgcctaacagagagaattgtgggttgtgaagtctctgactcttttgcatgctcataggactctcttcctcttactgggttgcttagtccagccttgacatgagggcttatgcctagtcttattgtatcttgttatgccatgtttggtggtatcactgcaaggcctgctcttttctgaagggtaactgagtaggggtggatctgggggataggtgaggtaggggggggaggactcagaagattggagagaggggaaactagagttggaatgtactgtatgagagaataattttttaagactgctttcagttttctcaccaagagtataattacagttgggtttaaaaacaaaacatattggccaaaggaaagaagtaagatgcatagaatgactacaataaaatgaaggaaataataagtgcattcaagaataaaaatggaacttgtaaggaaaagaagcacagttcatgtttctccaaatatcccttactgtataaggatcatctgtgcttttacattgttgtcgtcatgagacattatgaaatatcccctttgtcttccagagttatatgcaggcacgcatgtaggtagaaaactggagtagaccatctggagggcatactaatgtaatatgaaaatcaagccatagaaaataaatccaaaggattgatattgttcaatatgaaccccatattaagcacaaatagaaagacatgagattccagaaaccaaagttactaaccctatggtttggatatggtttgactatccccaccccaaaggattcatgtgttgaagtttaatccccattgtgaggtagtaagggtgcaaactaaaaccaattgtagtgttaagaagtaggccattagggaggtgctaaagcttagataagaatagaattgcgtcattgaatgttcatggctttgtcagaaaatgatgataaagaccagtactaacagatttacattttctccacttctagttacatgaagttcccatctcaggactctgtcactgacaggtagttcaccaggttcaccactttgtatctctagaaccaaaaacctaaataagccccctttcattaaatcttactcattctgggttattgttttattagaaacagaaaatggatgcagaaattatttatagacaatgctttgttgatataatgccttaagccactagggattaaaaagaaaggaatcttggtggtgaaatatatgagaaatttgaagccctttgttgtatgtaaagtattcatcagagaaaaatgttcaaacctactttaaaagagatggaaactatttcttaatatatccaaagagggctgaagattattttttgacacaagttctcatgggaaaagctctctcttttttatttgctacagagatcatgttagaattgatagaaaaagagattttaaaataaataaaagaggtcacttgcaggaggagcttttttaagaagtggggttttgtgaaaagattctgacatttgttcaagtcaaagtattaattttatttttataagcaaggtatgcagatattgctccttttggtactcctattacttttgtaaaacaggggctttgtgtgcctgcaaacttcatagtcagggacaatggccacttgtgcaataacacaggagcccttgctcctgagagccctgaacatagtgctttactaaggccatcttgaggtacttcataatttgtgatcaaattattggatgcaattgtggcaaaataaaatgtagcataagaatttatcttgattttccttttttcaaaaaatttccttttggacatttgataagggaatataaagcctccacaaagatgtactacttatgatttctgataatttctaaatgatattttcttttcttttacatttataaaatcctattaaggaagaatttcctcctcgttaagtcacttctctgacaggcttcataagtttttaaatgcaatcaagtgtgattcagtaagaaaatggtctcaatgacccaattccttgtcattgaaaagaaatgcttattaaaaatatatatgaaagtgtccattaagagtgaataaaagacccttaaagtacacatacacagattatcatagaagaagcatggtgataactggtagaaggtaatgttcttttttaatagatatattcctgaacagtaatacaatcattatctatctcctttccattatgaaagaattctattctaacataaaaatggaaatgctacttaagaaattcctctgcaattcatttttacaaactaaatccacacatcagattcctgaattcattggcatgttgtggtcttaaaacatagctatatgtatcaatgagaggcatactggataacagacacctggggtctcagaaacatgcccagtatcaagagtattgtctctgctcctctctccccaccctcagtctattaatgtctagggcaggtgggagagctacccctgtggtcataagagcaaaagagctgtccctgaaccccaccagctacatcactaagggatcaggccctgcatttttccagggcaccataattgagctaaaactgttagcgcagacgtgggagagccagccctgaaattgtgatcatgggaaaactgtccccattaccctgtcttgtggtgacatgggggtgggagaattgacactccccatctacacctgagataggtgggagatagaaccatccctaaacccccaccagctgccacatttgggagagaaggtcctgtaccttcccagggcagcacaatagagccaaccctgttagcggaggtgtgggtgagacacccacagaaatgttgagcatggtacagctttccccatttcccatatggcagaccaaccctacagctgcccaggctcagacccagagttatgacttggcctgccccaacattcatcccatctatgatttgctggagcacgtgaaaagatctgatccacagatccaaagttgcagcatctccacaatacaggtggccagtgggatgtccaaaaagagtcctagctagaggccagcatcaatagtgtagtggaaaacagggatcttgacccagaccaatgactctgcattgaatacttccaagtattgatataaggactaagaagtatacagcatgactattgggtcacactgctgtttccatgatgagactttgcaatttcttcccttttaaattttttctgcaatttttctcttgaattttgttttaattcaggggagagatgcaagggcagagggtggatgcaaaagggacagaggctgattctcacatgatgtgagaaacacaaagaataaaaaaaagtgtatcttctcattttgtcacagaaaacttctgattctgattgattctgttacatccagtggattaaaacatagaggtagaaaagggtctcttgcaaatgcacaatggtatcatgactcagtgtcctagattgttttcataattaaggacatttgcaagcattgacaatctaggacagtgggaagaggcaagagctctcctcttgtgtattaaatagcaagtgctttgtggccttcactgtgtgccgcttcagcatacttgtcaacctataaaataggatcaggtgtcattggattcttgggttcttaaacttttgttgcatcagaatcaccaggagtcttgctaaagaacaacttgcagtccccaagacccatcatcccacttgcttgttcagtacatcaggatgaatccagaaattctacatttctaaaaaatcatcacgttatgtttaagctattgctctggggactatatttgtgaactattgtcctagtagaattctaagagaagactccaaagtgctaacacctacagaaataatgtttgatgaaatgggaccaatggaaagaatagctgtccttataaggttaccaagaatgagaaatgtctcccaaagtcctgaagagtcatgagcctgtgtgtgtgtctgtgtgtaaattagaggtcaatgttttctgtcttcctctattgttctccaccttattttgggggcagtttctctcacagattggctagacattgggattctcctcactccatatcgagcataatgctcaaagtatctgtatccctaggattctcctagaaaactagtagttattagtttattgctcaattctacattctggcatgacctaattatataaagcactataagtatattatgacatgtggggcattacatttctaggaaaaatttgaactaaccaaatgttctttagaaatggaatgaaagaggaaaaagcctttcctgtagtgcctaatataattgtgaaaacacagaacagagggaaatgcaagcgaacacaaagagattacttaattcatctcaaatagaaactgaattgctgaggcagttctcaccaccttatttatatatcagattgctcacaaatcatgatgtcacctaccaggcagcaatgcatcaagaagtgtgtgacagtgcaacaatgctgaagacagagggagagccacacagcagaatgatgaaaaggcatcatcaagtcataaaagccacatggctgtacggataaatattacataaaagcattacatgataatcagaaactcgtttcagaaaccccctactaccaagaaagtaatgtttatatcaaaggacttatatttggtgaactaaaggttggcacttcttgaatatcttgaatttaatttacagatggtcaacaggcaggaatccattccctaccacatttgtgaggcaactctcaaaaaatgtacacaaacaaattgggatatggtctcatttttccatttaaacagtatgacacatgactgcctgacagagttggtgctacagcaaagtacgtaacttccagttttactttgggacctaagcaacagctttacttcttagttcctgtgtatttatttatttgagacaaggctttatgtaacccaggctggctagaagtcaccacacagctcagaacgaccttgaattacttatcatctcaccttcatctttcaagtattgggattacaggtgtaaaccacagttacaggcttcggtgttacttcctttaaaagattttttttttgagacaaggtctcactatggtaaccaggctggcctccaactcagagatccacctgtctctgcctctgcctctgcctctgcctctgcctcccaagtactaggaataaaggcatatgccctcacaccaggctagtttctatatccttcaatcatgctgtttactactgaagtccggagtacacaatattttttcataagtttatacttgtgtgtgattttaacaaggaaatcccatgctctttattatataattgtttacttcacttctctggggcattccaatcagaggcaggatgaagaaagctaggccgaaagctacacacacacagcccctcttactcctattttgaaaagttaggaaagacacagtcctttgtggatttcatttattgttatggttactcaagtgaaaatggatattttcaacatgctctagtcgcagcagcttagaggattacttaaaagtacaggttacatgtactgtgggggatggactgtggttacatttaaagaccaatgcaactgtgtttcatttttaaaggcatctccacagtcccagtgtcaatttcccctcgaaatatgatcagatagcccttaaaacatacctgtattgactaggaacaaagaaaaagagttgcaaaggacagtataccaggacctaataacataatggattctgcttacaatggatagagctctgcctccgaatcggttgccttaaacaagcaaagcgcctttttaagggaagacacaggggaggcagtttcacataccacacctcagttcagtagaaagaggtcggataagcactctgtcctgagacatacacctttcattttcaattgttttcaaataaaaagagagaaattcccttttcaagttggattgtttaaatgcacctacagctactcctgtctggcaaaggctaggcaagctctccctactgatgcatttcaaaaaaggttcaattggcaaacgaaagcaagtgcaaagggtttttgacaaaagaggactagagggaacacattttcctttcacggaaatactgttctagaaaatcagacaaggtagcaagtcaaccaagaatgtataagatactggagagaggaaaaaggaatttgaaaattttcaaaccagcaactgcatagaattaacttaaatatttaggtaaggagagcattataacaataacgggctagccagtcaaacaaaaccatacctttcaccatgcacctcacaacctaaaccagcattctttgaaaatgtagttgtcttaactacatttcacaatatacaaagatgaaataaaatgccctggatcctgtccaatcatcagcatggcttattttagacctacaactatgcagggctcagcaaacagaacaggttaaagcaaactcagaagctctgaaatatctactctgataaagagagggctcatttttcaaaagcaatgtacacttagattccagaattggttctaataaataaaagtattctatcaacagttaaatgcacatttaagacaataattattttttgattcccaaatgaatgatattatcttcttctaggtttttgttaagtagcacatgaaacctatgatttattaggattgcagttagatattctaggttcaggttttaaggtttttctaatatcactttaacaaaggcacaactagtttcaaaaactatgacatgtttttattcccataatttctcactaactagctacgatattttctacttaattgacgttccacatgtgaagggaataactgaggactgagaattggccatttgaaaagaagaaacacaggaagttttcaacataattatacatcatatatgtggaaagacactaaatttacatattgaatgttctgcacactctctgagagtatattcatccatacacatgtagaaccacatgcccgagtcattacttcttatagcagagatacccatggacagaatgcctggtagctaataactctttaagtaggataatagttctgatttgtaacgtaacaatgttatgattagggtgtgtcactctgttcaattacttatgggcactcaataaaaacttgtagaattaaaattaaagaaaacactgaaaaattttcatctggaacaatccttttgcacatttcatgcaacactagattttgttctttatgtagaccaaggcttcaaggacatgctgtgcatggaacaaatatattttttaaaagcattagtagagactcagatggactcagtgcagtttgatggttctctggatctgttaggtgtaattactgacatgaatccaaatgcattcaactgagaagagagccaaattaaccacaatgtgggtatataacagctgttattcatttcataattctctacaataagaataaaaatcttaaaatatggaaccaaagcatatctctaatagtgattaggctacctacaatgtattttggtcatttcttaagtgtcaattttattgttttcacccacctgctccaatattctcataatgtttttcctaatgaagacacatacggcatacatagcaacaaccatacagtaaagaaaagccaaatttgtaattgccagcttaactcatctcctacacaggactgatgaagtcttgctaaatgctcagcacatagaagacagctcttacagtttttatgaatctgaggttctgcatttagaatgtaagaacgcttaatgagacctaagtaaattacctatcttgtttcacatatttatttttgtcttcccatttaaaagagtatttttagtagatgtaggaacttgttttctgtaagggctgatagaatgtgagtttagcacttattcccactgaactgataccatacgtgtaattaccgtggtatgaggccagaaaaaataaccactaatgataaatggctaaaatgtgctacaggaagaaatccttagaacctgataatctagagtatattctggaagtagtttagattaagtacactctcataaactaatgtggtcactaatactcttaaaaatggcccactaaagactataatgagatcccagggacctaccagtaagtacagatcatgcattatctgccccaaaatatatttgactgtcatatgctgtacacttccacttgtataaagtataaatgcaaattcctatcagcagtaaggagattgggagtgtggaaataagggttgtgcattgagaaaactttagaaaggcaatgcacgttaaaagttgatgtgcatatggcctctctgttagtcataaatcatagtaatgaaaagctctctttctttaggatagccagttaaatgctatcaatatcaataatcatcttcacatatctactggaaacaatttaattatttactattatatcgttattaaatgccaactgtattctaggaaaatactcagagatttgtatatgtcctctcatttacttcatatgaaattctcatgaaatggatgacattcctttctctgtcttttaaatgaggaaggtgaggatcagtaaggctaagtttactgtcaaggatacactgtatatggaacactcaggtttgtctggcttcaaagatagggaggtaaattgatttcaattgcaggttaagtcaatgctgagacatctgcctgaggtgacagaacatcaaaagtcaacaggttattagtgattgctacagtgcaaatgttgcatttcatcatgttaacagtgtttaaatttaaaaaattgaaaaactatcaaatcgctggggcccaaataggaatatgatattttggatacaggcctcaagctcaattccaggagctcaaatctcccattgtcttttagatgaaggctggttacttacagatggcctagccaaggtggagaatgtctcctagtttgtataacaatagacctaggccctgagtgggcccacacctatcctgaaggcaagtgactttgtggaatatctgagggcttgagtatgtgcttagaggactatcttgaggattaaagaaaatatttgatatcagctctatacatggtaatagatgtcttctgccagcactcctacttttggaaagctttttaagagaatgtttgaataaaccatggtctccagtactgaccaagcgccctcctgagatgacaagatgtctctgtcttgtccttaatgccgctgggtagctaggaatttccccatccacactcccccactcaggttaggaccagcagctgttctgctggttcccatggcagccccaaagacatgagtcaggaacagatggcctctgtagcatgccactgatacaggccgggccccggcatcaaatgaatgacaccatggcataatgttttatgaaaatggacccaatgatgtttcattaagacaacacagtccaggcccaaggaaatgtctcattcggtagaagtgcttactatacaagcaagaggaacatacttccattcctcagcaaccacattaaaaaagaaaaaaatccatgtatggattgcatgtaactacaagcacaatattgtgtaaagtggagataggacaatttattgggggtgatggagcttatctccaggttcagaagacccttttttgagggaataaggtggaaagtgaaagcaagacactcgacattctattctggcctccatctgttcatggatgtgcacattgtacacatactttagtgtgctaaaagctccaaaggcctgggcaaaattactatattgaataattttgagaaagccaccccaaatctctattgaaaaatgccaacctagagaacaaagagaaaaagctctggttctgaacaaatacagatttctttacatgtttggtaatatagggaacaaggtagtttaagtagggcatcactctgatattcatcttgtctacaaagacaaggctttagtaagtcatgattttcttttagttccacctgaaggacttaagaattaacaaagaaataaaataaggagacttaggaaaaaaaaaaacaaaaacaaaaaaacctctcaccctagaacagggagacctgacttagaaacctaacctaggtcacaatgaccgagtccctggaatttcctagctggcagcaataactcccttacaaggccacaagacaacctaactaaataccaagaattcccagtgggccaccctgccctggggtcgtgaagataagaacagactatcccactgagtcaggagaccatccagccccaaagataagaaatctccaaaggatctgtgactctggtcacctacccaaacccctaaaagcctatggtttttctcctataaaagaagcctgctttagaggaacagggcttttcctttgtctgtcggactgggaggcccgttttcgcaaacgtcccacaataaacttacctcttgtttttacatcagctggactggacattgagtgttttggggggtaccgtccgatttgtggagactcctcgatccgagggtctttcacaccaagtatatgaacttggttaacaccgcttaacatgcttaacactgcattagcacctatgaagcattcattagcatatgtttaatatgcaagaatggtgttgtgtgttacctaagtaatttatattattagaaatgcataaatactgcttgaatagattccatcatttgtggggtattgcatctgtaatttggctactgttatttaaggtctcgagtatgacagcaggaaacatagctttaagccatcttaattttaaaaaaaatgtatgggaaaagagcatttattcacttagatgatgtaattgttttgagttaggtctctctgtctagttcaaggtaccttaaactcaagaccttccttgcctctgcctcataagtgctattattacaggtgtgcaacaccttgcccaagtcaagacatacttattttaagttttagaaaatagagaaaaaccaaaattgctaccaatcattatttctagaatttacttccttgttaaatacagttgaaatttactaagaaaaggttttatataacactaagagcaggcatttggagagggggatgaaagacatgtaagagaaggacagcagtacatgttctccgtctgggaaggctttctggagagaatgtgcctgtgcattgcattaaaataccaaagtgtatgcatcaaaacttgctattctcctctgtgaagatgaagggacctgctcccctttcggtagccataacagccgaacacgtgcttgccataaacttgccttggtcacttagaggtcagccatcagaagttagtcactagaaagtcagatgcctgcctcgtgacaaggaaccaatcagaagttagctggtggcgctatgctttatgactctgggtgtgctttagggacaagcacacagcaatgacgtacggagcatagcaaccaccctgggagggcctatgggccataacaaccagttgaccaatcaacacagggcaagtcctccaagcctggaggtacaccaatagtgagcctgtgcgtacccctagacactccccttacgctgtcctataagatctcttgggaggccctaggagccgtcttttgctagctatccgcaatggcaggtgggtgaaagacccgagctaacatggggttagctcgttaaattacaataaggcctcgtgcagtttgcagcaagctcttgaatccgcctggtgattggggtgacctcgagcgtggcctgggaccccggatacctgagttttccgggggtctaacaaagactgattgattctcatttgttatcaatgtacagaaggcaacaggcaatcctaatttccatatattatataaggaagaacaaaaccattactgattaaataacactttcagcagaatcacagttgtagtttgctattttaaaaatcatttttttgtttatttcccctattgcttcctgcaagtcattgcaggtaatttgctgacttccataaacatggaaaaaagagatttatttacaaatatttggtaagctttctttctctacccatataactaattaatggttttaatggtccctaagttaattattatctgtatcaacataagtacaggttggagaatgcagattattcccagcactttatgtagtttgtatactgtgtatacacatttccaagtacatttattgatttagcataatttttgctgcatgtaaattagctttctccattttacattcaaataaatactatattactgtgcatgctctaattatgattatttgggaaatggtgcaataaatgttagttggatgaatgaaataacctaatacgctaaaagacatcaatatataattatctattggtaaaacagtgcagttctgaaaaaataagtctcttgctctctagaaatactgtggcttgcaactcagtcttccttcattctttcatgaactttttccttcctgctagcgccttcttaagctgccacaggtttaaactcctttgaagaaagaatcagctaccagctaactcctttttcttcacctttccctgttctctctcagctacgtcctcctcgtagtcacctctcctttcttgtgcttcaggcttactacctcagcaaaccctgaaaggattccttcaataacctgggctctcctccctcatcataccatactcttgtgtctcactttcaaggactttcgtaggctgtctcaatcctccctttcccacagttctccaaactcaactgtcttcctgaccacactaacaacagaaaatatccacttagcacgaaagcatcagagactgagaatatgttaaaaggcatcactatatatttgctgtgtaggctagagtacaaataatgcttacctctggcaattttattggttcccacatttagtactcacaactgagaaaaaaaattatagatattatttcactttatgaggaaagtcaggcacagaaagctgcaacaccctgacagagattatagtctagtaaatgatggagacaggacttgaatttaggatctcatcctcttcatcatcttgttgtattttcccacaatccagtaaacatagcttacatatggccctgatacctgatgtgctgctgtgtagcactgatgatgtaatttccatttccttgaaaagcctgcctctgtatagcaaaaatttgacccgttttttcaaggagctcaactaatatgcacagaaactacacttgttcttttccacaaagagttgacattttgccaaaccaaattgatttctccctttggataggcctaccaagcaaataatctctatcatgtatcagcacacaatttcctagctgctggttcagctttattaaatctctttgacaaaactgaaaacttcttaaaggtcggaactattacttgagcatttcttcaatgagcattaaaagactcatcagcatcaacagagagtatattctaggccctgtgttattatacttattatctcatttaatcttcactaaaactataggagataaatggatgaatggatacagaaaaagaatttgagcataaagctaggtggtggagctaaaatggacaccttcttaacagagaagtcacttcttaatcaggctcacaaattacagcacttcttagcatataatacctatattctcatttacagtaagaaatatgattttctgtcatgacttttgcattctgatctccaggtatctaaaaaacggagatttgatacatgatgtttttatgtttctatcttgaacattaacattttcttctcggcttttgtgctatctgttcttacatctgaactcagttgatgatatctggatttcagatacaatcttttatgttataattattcaattctttttgaataattaaatctcaatacatttctccatgataaatgtatataattttgcatgccatattactaaatttcattgtttctatctagtagttttatgagctcatggactattgttctacaataattggtccttttcttaaactgatataaaatagaaattgttaagtagcatgtgtagttagaaatggttaacaagtatatgtagttttagtcaaattataaaaggtttttagttattattaattttgtgttactggaaatgaaaccagggtccttgcaagtgggagacaaggatttgactactgcactgtatcctctattcctcagttactattttaactctatacatttacagggtaccatgtgataattacatttacatgcattcaatgtccaatgatcacatcagagtaactggcatttaaacatttttaccatttttgattaatggataaaattatacatatctatgtgatacatggaactccatattgacatatgagtatattcttcttccttttctgcatcttttcattctttcaacttagactgtacctgaataatcttaagtatgtctttcaaaacttattctgaaatatgaacataggcaacatgtaaaatactatcgaaatgtataataatttatatttgtgacacataggctacaagttaagaagctaatatggaagattactatttgattgacctacatatagtaacagtctttaaaagataaatattattccttttcattttaaagttacatgaatgtctgagagtgggatgtggcatgtgtgagtgcagagcccatggaggtcagaagaggacataatatcccttggaagtagaattagatggttgtgagttgcctgatgtgggtgctacaaactgaacttggatcttctgagagaccagaatgcatttttaaccactgagccatccatctagcatagataaatctcattttaaaatgcatcttttaggctcatatccctcaagttcagcatatgcagaaaaaaacatatttgaatttttacagtgatactagaagatataattgtccgtatcttgatcagatgtaggcatattttcagggaaatagtgaaagactggtaaatactgaggtgaagggagaatttagtatcttccaaaggaatgtagcctggttggcaccttgatcttcaagcctccagcagtggaagataatagatctgttactttaacctaccagtttctagcattttcttccagcatttctggtaaactaatgcttcacaactccaatcttcaagcaaaacccgatacatgtagtttagactgatttcctgggtttcttcctcatgtatagaatggctttttaaggattttccttaaagatctccttcttaaaggtttctttctaagacattagaaaaccgaacatggccaaatgatactcctcattttaaccctcacaacaaaatctgttttaatactgaattttctttctctgtgagtatactaccttcttcagtgccttcacctctcaactcctacatgtaagcaatcattagagactgctagctctgcttttcgacactcatcttgtgatgcttaattttatgtgtccacttgactgagcaacatagttcagaaatttggtcaaacattatcctggatgtttctgtgaggatatttttggaaaattctaactttcaaattgatgggcttgaataaagccaattgcattctcttataagaatggatctcacggatcaactggagatcttagtaatatgaaaagacaaattttgctcaggcaggaggaaaagcatacttagactttgctgtatcctggatttctagcctgtggaccttccttgttgtcagtttccataagcacatgggccaatacctaaaatgtctgtcttagaccataataaatgctacaaacagctgctattaatggtaattgacagaggcaaggataagcataaagaatctgtactcagacaatttccattccattcaacttgttgtttgtgtaccctattgaggcaaattccttaaactgtatgaccctcagttttcttaaccaaacaatgtgacaattatagtgcccactgcatataggtagaaggatgaacttgaaacttgtcctagaatgtagtaaatcttagaacagtgcttgctatatggccaatattataaaagttcttgcaatttttattattgctaaatacagcagggagtgctcactccaatatcaaacatactgttttgtatcttgatcagatttagttttgcttttggttgaattcagggttagggttagttaaccttttagtcctcttagtcctgaaaagaagataggtggctcctttctccctactgtgaaaattactttctccaggaaaacagccatgccttctattcttaatatttcagtgaagacacctgagtcctaatcaccttcctttatctgtccatctggcccctcaataccccatctgtttttagataaagtacaactcattttgtagctcagtctggccttacagtggtgatattcctgtttctatttgcttagtgctgtgactatagatctatgccaccattctgagcattttaccctcgcttccacaaaatctaacaaaaacaaaaacaaaaaaaccagccctacttctaacatatggtcatgtttgctagttgagagaacttgtagtggatattactgtggatgctctgcagtactcctttctccacctggtaatagtgctgtcaatatttattatgacttgacatgcacaagcccccaaggagaactgttgttacagcactgtcaacagatacatgcctacaaagtgaaatgaaggtctgaacctcatctccccagtccagcctttcacttctcatctcactctcttcttcctgatggccttctctagaacgtactatcatagcaaataaatgaaaagcaagatgacaacaacggaacatctcatattgattacgcataattttcagtgtttagtgtagaaggagaagaaataaaaacagcaacatgagataaatctaacagaaagaagtaatagtattagttttctaccaagaagaaaatcactttataactaaaaattttttaaagaatcaatcactttgtactttatgcaactttatagaattcaattgcttttatgggggtacctgaagatagaacctaaggtaaagttcatgctaagtaaatgctctaccactcagcaatattcccagaccgtgtgtgtgtgtgtgtgtgtgtgtgtgtgtgtgtgtgtatgtatgtatgtatgtatgtatgtatgtatgtatgtatgtatgcatatgcatatgcattacatattaattttaaaatagaggctcactaagctgtaacaaattttctggagactgtaatcttcatgtttcccaggcctgtgctgtcacagcatactcaaagccttggaaatgttttcatacctttgtttatatcaatgagctgcttcttcttcttctggcgctctagcttctcttgttcagctttctcttttgcgagttttgccctccggctcttctcttctgtttcttttctcttatggttttctttcagtgcttcctaaagataaaaataaaataagataaatcatggccatcttctacacactataaaatggagaaggtgtgcagtttaaaacttctacaagtttgcagagatgggaaattttcatagcagtcccagagtgtgggcatatactgtttgttggcagagacaaataattagccttaagacatgtcttctggaaaaaatattgaaaataatgtttttagttttcattatgttctgtgggaggaaaagtgggttatctatgttgtagtcttaacaatgaaaatacttttctcattgttaaaatgtgaactacttttgatacacaagcaaagtgagtattgtatctcttattgaaaatttacctgttatctgtaaaatgagttaaaaaaatctacctcactggatatctgtgatgagctatgagatgtgcacttgaagtgctttcagcagagcctaatacattataatcaaggtattttagtctatgatgtggaggtggttgtgttgctggtggaatgattacacctaatgatgcaggtcgtgaaacaatcacctgcaagttttggagctttttatatggtgatactgttggaaatgatgaaacagatttcaagctcttccatatttatggaattccagtgatcgaatacattcctgtacaggatattggagaaagttgaagcaacgtgaccagacgaaataatgccagcttctttggagctcaaataagccactacattttaaagacacatcaactgcgtgttcattgcttcatgttctgtttttcccccatgattatgattgattggatatatttcatagtaagtgcttatgtttatactgtacaaaagtttacactttccctaaaactatattgttccagcacgaataagaaataaaaagacaaaatcccaagaataccccaaggtttttgccttgaggagtctgagtctatactgaatatttttcttcatgttaaaggccataatagtttaaaatattcctgaaaacccctctaaacaattctcctggcttgaaaggattgatttcttcctataaaaatctaactgatttttacctctgtggcatctactaccctagttaggcaaatacgcccctcattaggctaagagcacacaactatctggctactatagacagaatcaaagatttccacttaaatttatatactagattttatatttcagtgcaacctctcaatattagcactgctgtcatttgaggccagatgattttgttgttgtaggggttgccttatgcactggaagatgtttgatggcatctttgatctccatccactagatgcaaattgcatctcttaaaatgtggcaaccaaataggtctcttgagattgccaaatgccactattgttgtttacacagagactgcataagacaaagtccatcaaccttgatccgaagatggggcacacccagggatctaatggaagtctatggctgctgagggagagggaagtcatggttttcagtgatgtggccactagtgggttacccaggagccagtgaagagcttcatgtcctttctccatgaacagctcttcttagtcccaatgtcttctaaagcaaaaccaaaataaaacataagacataaaaatagaatagggacctggtgaggggtgtgtgggagctggtggggatagaggaggctcagagaatgtagagggattagtaagaccagaatgtactgcattacatgaatgaaattatgaaattatactaactagaaaaccaccaagtgctgactcataatcaggttaccttttctaacattggaaacatctaaatgattttttaattattttgtcagggccagtcatttctatgaactaaaaatggcatatacaaatacatagctcatataaatgctacaatttcttctgagtacaaataaagatttaagagagaataaaaaatgatggaaattgctgggcggtggtggcgcatgcctttaatcctagcactgtgagttcgagatcagcctggtctccaagaacagttccaggtcatcctccaaagcctcagagaaaccctgtttcaaaaaaccaaaagaaggaaattttataatacattgcgaataatatatattaaaatatatgagtttgaatggagttactctatacaggagattatactcctctcagaagcaataggtaataaataaaaagcccactatcaggtgtgggatacctccccttgagttgctgggagtcttggaaacctctcaaatagtacaggctactgccattgctcttggttgcccaccaaaatatgatggcaaaacactattgctgaagacagcatttatattggccacaggacatggagaaatccagttggtacttccctgctggctagttttcatagtactggaaggtattatgtaggcatgtggggaataaataattaagagttttactcagttgtgaattctgtgaaggacaatgacaagatatgcccatgggtgcaacagtggcaaatgctatgggggtaaccaactgccttatgactggatgtaaggcctactccacaggaggaaaatcatgtatggcactgtaaatctattcaagaatccatggtttgggagttcacaagccccatagtatcagactatcattaaatttgtacctttccaaccatagattagtatagctctcagaactcatcagaggagtttatttgtgcagtggatagtggctattggagaaattttctgaataaggagtttgcatcattcctttctgatttgtctcagaacagggattcacttattatgccgaaagatatacaggagaacccagggaatcagactacactgccaacccatgggatggtgtcaacaatgtacacagctgcccttacccattttagtagtcctttccagaaatgttctctcctttccttttcaaatttccccctcctaacattttactctactttgcagattgcctttaactgtcctggctgctagtgagtcttctaaaattttgtacattttcctggaagccagatcaaagtgctgtgaagatagaaatctcaatgtattatgtcacaaaggaatgtacaggtaagttgggctgtgctcttatctgttggtttgatatatgtggggtgaaaatcctaaatacttgaggtagcagtaaaccaggatccacatttgtccagattttcaactcattttgggctgataacggcaggttataaatgagaagcttaaaatgagctttgcagcatttgactgagaaactgaagaaccatatgattgcaggaggaaaccactgtagtcattcattagaattttcagcagcaatcatgatcaaattaaggctttccattaacgaaaggaagaaatcctattctctaattaatagcaaacaacattagatagtccttctctatagtttcattgtgcttaaagggcatattggattgaagaagtcacgacaaatgctcagggcaatgagttttcaactgcagcaaccagacttgtagagtcagagcctcttaagactttataagcactataatactgctaaactttttctttcccagagatttccacttattatagtacaagtgacctttaaagttcctcttatgaaagatctcatgaatacttcatcaaccaatcagctacaattgcaacagaggtataactttcttacttacaggcgtaattgaaaccttgattagcttcctcaagtagttaggtgactcagtaacagacactgagcaaatatactgatagcatagctagatggtgcttagagtcttgcactttaacctatgtaaatatggtatgaatcacagatgcgccatgtgccacaggtaatgcagaaacaaaatagaacctttctcttctctttgattcttatgttccttgctttctacagacaatgttggtctttgttcaactcctttctggactatactttcttctcccacattgttttaccttccaatcaaactctgctatatttgattgtctggtagaaaatccatttattactattcagtgtccttccaatagtttacaaagccttatttgtatattactccatccaaagtccctgaccttgtctccccactgcctattatcctccagtctcattagtctcctttgcttagcttgaaattttacatcagtattccctctaggctctcacacacctccatccagtctctcttttaatgttccctctctcactacttcttcctcaagaatattatacaatagaacctcctaaactctgtctcccttttccctaatgtaaaattcagaacataaaggtcaaaacctagttaaactttccatactcttctgtttcttagaattagcagctggagctagttgatttacataataacagtttacagcctgggagttctcaaaacattaaattaccaagaacatctccacacatagttcccaatacacctcatatttctttattgtaaaaaatcatagcagccttggaaaaaacactacaataatttggaaaggtggctctcttctaatcatcataggctttgtgtcattgacatctatctataccagttttcttagaaatgttaatgctgagcatttctgaggcttggtatttgtgacttgtcatagcgatgtagttcatttttctgcccagaaaactcctttggacagagattagcacatactcagagcctccaaggttaagaaaacagatgcatgatactttcaaaagtgaggccttttctttcaaggagagattttcagggtcctcaagcattaataccatacagctttctcagtaatcttttcttttaagacaaaatgttttctgatttgggtagatggcatatatagaaaattctgtgaatctggggagggtctaggccctgctccaaatgatatgtcagactctgaagaatccacatggatgccctcaccctcactggggagcagaaatggggtaggacagtgggttggtggggggaggggaggaggggagggacagggaactgggattgacatgtaaaagaagcttctttctaatttaaaatttaaaaaaggaaaaaaaaattgttccgtgaatgtgatttgtataaatgacaggggacagattcctggaagaaactaatttgctacaggtgagaaaggctgctgaagtgaattcaagtaagtgctcaccgaagaagccctcttttattctgcacaaccagctcactgctcatactccttaggaaacaaataaaaaattaatgtgtctttcacttgcagtacatatctggaggtttgacagacaaacagatctttgcacaccagcatggttgtgaagagaatctcaaaggtaaattattaaaaacaagaaaaaagaaaaaagactgttatgtgcaaatctccttggatattaaacttgcagttggttacaaagcggtcatgcgccaataatgacggctggctgtgatccccaaggccttcttttaaaatttgccttacaactgcaaaaacatgtgatctgaagttggaggaaaaactgtctctcccgtcacagtccattagattgctgaactatgattagctagaagttaatctgcaatctgtagcatggaaaagcttttcaaatgctgcaggtttcagcagacattattgtagtagtaatatgagcatccatctttgcatctcagaaagaaaaacaattgagttcaacatgtctctatggaccactattttgattaaaatctatgaagcgctttgagtaactataggaaattaatctataacttttttgagctaaaggaagaaaatgaaattctgatgtgactgatacaatattttaatggaaaaacatctcagggatgtatgagtggaggaaaatatagcagtgttaagttacagttctgaggcctgtgtttactgccttaatactctctctaagaagctaggagtggcagcacaaactataaggttttgttggtttgcttttcagtgctgagggttcaatgcatggtctgatgcaagttaggaaccaccaagcaacatccctggcttctcaataaggttctactggagccagctgaggtgtagtgagaggtgtggggagacttggatgagtatatcaagttaccttgtgaagtagaatttatagacttgcccaataggaatggtcctcaggaaatgtgagcctgagtcctctaactatggatagaatcccatgatctcccccaggaacctattctaactgtatcacttgtaaaaaggaaatacttcctacgtcttagaaaaagctgtcagtttttaagcctgtttcttgtttattgacctctgtgtaaaaagaaacccaatcaaaatcttcttttaaaatgttttcttagagatgtacattgtctttaggactcactggtgcgcccaagttccacaataatgaagctaaccctcaagagcaatacaggattttcacttcagttcatattgtaagggatggggagggatggatcttagcggcctttgggaaaatctgtggtcttgatccctgtcctccccactgctccaggctcaatcatcctgcctcagcctattgaatacagggattacacagttcagtgtgagtttctagaataaaaacatcctcagatatatctttttccataaattaaataacacttggatatccctctgtgtcgcttctgtctgttagacattatttttcgctctatgcttctccattatgatatgacttcccttaaaataaggaaacaaggattggaacaatactctaaagaggtatgccattctatttatacgagtttttaatgctcaaattattctaaaacacagcatctattttgtaacattttcaagttcaactgtaaagttaaatcggttccaatatatctgttgttgccatcaaacctctgttcaaacagtctccttgggaagtcataaacttattttggtgagggcattaatctgtatttgaaattcctctttccaaactgaactccgaatctattgaaatcagttgtattatcttagattcacaatattttttaagcagaaatttggtcacccagttctatcatctattctactttaaaacttagtctagtatcatttttggctatttcctgaaatgacagcaacctaaatttccaagattaagtgtacctggtaagttctaaaatatatgctatagaacacttagaggattctaaaagaggagttccctaaaattagatgacaaagtcattgtcttttaataaagataataagaaaggtagggtttctttgactatacacatttctggtgtgttcttttaaaaagtcatatttcacacactgcctgatgtgtggtaagtactgtttcactaaaacttaagaatccttattttgtggtgtatttgtacctggccttgtctctttactatttgcctgatgttcttaatttatattttaactcctatctagcaatatacatatctaattttttttttacttctaccccatcttatttggaatgaaatgcttgaaatctctctgaatatagagccatttagctcttctttgggtgatgggagagacaggaaaagacagaagaggcaaggaagacaatacaaaaatactctggttactatctagaaattttttgtcttcagcgatattcaggaagtcactcacttattcattaattctcaaccaggtgtatcacgggttctagtccctggataatcacatgaggcatggtctctcatggtactgtgctgtgattgaaagaagccctagaatgttaattttctgtggctctatcttcagatgcatgtcaggtactatcttaatggtagatggactagtatcctggagtttactatctacttctttttaatcatattgataatgaatgtcactcaggaaggaatacaaatcttagggaataaggagaaatttctttctcctggactacagggaactgattctttcatagaaataaattaaaatggttgagctcaattttcttttcacaaagctatcttgattaccagtctcaactctgtgcttttctaagtacaaagtgattgtttgctgatttgttgtgctatcttctgaactattgacagcaaggtgtccttcaagtaattatggggttgtgtctttccctttattgatgctgtctgaacaatcagtgtaattctctctctctctctctctctctctctctctctctctctctcacacacacacacacacacacacacacacacacacacagagagagacacaccacatcataccataccagataatggaaacgaagcaacacaaattgtaaaaatgaagccctagtaaaacatgggaatgtatgatgacatggcacctatgggtcacagtggtctataaatttagccaataccagttagacagttggtaaggaaaatgaaatttctattaattagaaggtaatgggagtccttatacatgttatcttttcttaagggcagcttcacaaatgaccactgaaaagtgcactcttttcttatatataaaatgctatttattacatgtgtttcacatttcacattaattgaaatgcctgtccatatatttcttttatgaaagtttacttcagccttgcttaatttgcagcctctgagagggtaggctcactgtcagttcacttcaggtgtggtattctttttggacaggcattctgtatttacatatttaggtatttttgagtcatggtctttaaaactctagctcaggttgggctcatttatgtagtgtatgcttaaactcacaggaacctccctgcttcggcctttaaagtgctagaattataggtataagccgccacacctgactcagataagcagtcttaacagtaagctaagtaggtagaacacttaatattgatgaggcatgaataactatttcttttatagataatttatttaactttattttatatgcgttcatgtgaaggtgtccaatccccctgaaactggagctacagacagttgtgagctgtcgtcaggattctgggaattgaacccaggtcttcttgaaggtcagccagtactcttaacacctggggcatttctcttgcctggataactatttcttaattaatgaaaactaagcagtttctttagtctaaatgttatctgaacacataatggacaaacattattcttgagttttctttattgggagtttgacccctcttaaagagcttaaatcatgagctgaagaacgtgcagaggcacatttacatacagagtctcactgtttaagaagtatacacaaatttgaaaagaaatttggagaagatttaagaaaacatgccaaagtttggaaatgacaaaccacaaacaaaagatgggtagttaatctcaaggacaactggagtaaggaagagaactatatccacagacatgaaatggctacttacttaaagaggaagttcactgatgagcttccagaagtcagaatactaggctgtgcagttatgttttaagaagagacttaaaagagaacactactgtacagatggtaaagcaatggaaccaagtcaagaaagtgttttctactgaaaatgattaggaagattagctagttagctgcaaaaaggtacagaaaacatgctaaggttcaagtcataagaacccttaaataatcccttcatttacattctaggatattttgtttccataattaattatgccgagtcattacttaataaaattggaaaaataaaatgaacatacaatttattgtctcttattgacatcttggcacttgggtatgtgatagctgagagtgtagatctcataaaaatatctgcaaacaatacattgtggatcatttcaaaaatgattctgaatgaggtacaggtcagaaccagagacattttgcttcgaaatcatctctccctaactagaagtaataagggtactgtcatatactagtgattgcattctgggaagcaagccattccatctgtatatgcaaaccctaactccattccacaatataaaacacatctcacttgtgattatatctttgatcatgacctagatttggctgaatagtacagcttacttagtgatgggaatatcctttgcttactatgctaatgttctaatgccctctcctttaccttcctcctcccgaggtaatatgccattatttatagaggaattttctggcctcaccatgaatcttctgtttaagttgccttatttattggtagagagggatttttgccattaggcttgacatgttggacaaataacttgcatgaggatttagggagtttacagacacactgggttttatatcctgtacaaaattttgcaataataaatgacatattttcgacttgacttctttcaatgtgaacttctgaacaaaatatcatggataattatttcacttctaaagtgaaatagagagatatggggatttttttgttccgtttaaagtgtcttagaagacggcaagagttacagaactggaaaaacagggaattcaaatgataaagaaggcagggtttaggacaaagtgtggtgcttctctcctctaatcccagcttttggaaaactgaggaaggaggatccccaagagtttgaagtccatctaggatacatatagagtgggttccaggccagcctgggctatagagggagactctgtcacaaaacaaaagaaagcacacataaaaggcaggtgtaaatcctatcaataattatgtgtgggctgtgagcacagctgtattcacaaagcaagaggaacatacaaaacatggaacaattcattctccctgctgttgcatagcaagcaagacacagcagagaaaatagccattaaatagagtcttgaaggactatgattttatccaggtggaagacaggttgagagtatgttaatgtgttgtttagtttttgtcacctggtgtcttagttggggttttattgttgtgaagagaccatgggaactcttataagaaaacatttaattggggctggcttatagttcagaggtttagtctgtcattgtcatggtgggaagcgtgacagcatgcagccagacatggtgatggagaggaagcagagaattctacatctggatccacaggcagaaggaaaacagacaagggcacactagctagacttgagcttctgagactttaaagctcatcccccagtgacacactccaccaacaaaaccacacccacatcaacaaggtcacacttcctaatggtgccactccctatgggctacagagggtcatttttattcaaacaaccacacctgggaaagagaaaaaacgactgaaaaaaaacaaactacctccatcaaattggcctgagtgcatgtctgtggaacattttctgaaataatgattgatgtgggagccccagcccagtgtgggtcgtacaggtggtcttgggttgaataagaaaactagatgagcaagctatagaatacaaagcaggaaacagcattccaccatggtctctacttcagttctggcctccaggtttctggcagttccttccttgggttcccttgtagactaaaacctataagcaaataaacccttttctcccctcagttggttttggtcatggtgtctatcacagaaatagcaaactagggcagaaggcattccatgcccagaacactggttggataacttagatttccaaaggctttccaatgttaatttaggctttatgcatgggcagtaactgaaagtttttaaaaacacaagtatcctaaaggtatctacagtttagcaaagctatcttaacgcagcatgaaggcagtttggagagtataacagtaaactcagggtaagttaaaaaacattgcagtaatccatgggaaggatgatgaatatttaaagtattttaaaatgaggataaagataggatggatttgagaaatattttaaggcataaacaatgtgcattaaagacagagcagatgtcagttagtagtgaggaaaatcagaaaccaggttgtgtcattcaccaaagagaatacagggattagttaagaagaaatgtaaaagttacaactagaatatactgagtttgtgtagttgtagtgattctagcttgagactatcaagcagacaataaagttgagtctggagttgaagattaatgttgtaacacagaaaagcacagaaatcagaagaacatgtactacccagagacattatgcaatgtctcagtcacactgttattattatacccatagtgaagcttctatttaagattgaaggaaggagactatagtctcccttccacacataataatattatcaacttatcaaatcccatccctatagtgtctttaataagctctctccaactccaggggacatatttctactgaaaatcaagactaagaagaattgtcttcattgtggaaactgattgttctggtggtcttgatacttatccttagcataggaatggactttgggagcccatcccacatagagggatactccctcagcctagacacatggaggagggtctaggctctatcccaaaggatatgacagactctgaagaccccctatgaaaggcctcaccctccctggggagcagaaagggtatgggataggtagggtgttaattgggggggggggcagggaggcaggggagggagagggaagtgggattgacatgtaaaacaagcttgtttctaattcaaataaaaaaatggagaaaaacatagggaacaaatggaataagagccatttatttgtgtacctgttacactaaaggcaccaagtactttttgtctctatggaagaatatgtggtatgcatattataggctgggcaagaatgtagtctcatatggtaatcctgaggacacctctataggcatgctgcttaacatgcaagatgaatgcagtttctgcttaaggggcactatacaaagaagtaaatgtcacctgaaacaaatgggaactcaccagctaatctggctctctctctgcaaaaaagagggactgtacttaaaaggtaaaactcaagagactgtctgatttctacgaattctctatgaggatttctcatcgtatccttacttttaggcttccaacatcttttttcagggctagtaattgaacctagaggtgtctacatcctagcaagcactctaggatctctctctccaagccttacacatttaaaggaaattggagggataggtggtgtttttagctgctttgtgtgtcatgcagcctttgtcttagctacacatccctgccactggagtggagaagcagacatggacaaaatataaggaaatgagcccggctctgcaccaatgtaagtttacaaaaacacaggggaggctacatttgccccaaggatcttcatttttttcttcccaattaaaaggaaaaacgttttcacaggggctggagagatgactcacaggttaagagcactggcttctcttccagaggtcctgagttcaattcccagcaaccacatgttgactcacagtcatccataatgagatctggtactctgtcccacatggaggcagaatgttgtatacaaataaataaacaaaatctttaaaaaaagttttcacattatgtaacaccctcttataaaatattagtgcctggaataatcattttgcaaatgctagtcaaacataccatagtgacaaaacaggtaaaatttttggaaaaccttggtttatagatatcaataagtaactgagtcaaccgtgttccttccatattacttgtgatttaagaaagcaaaactacgttcttcagccaatttttatcatgttttctctcctttgggtttccaaatcacgctgaaaaactatgaaaaagagcaaacaccaaaacaaaagaaaccagccattttcaaatataaaaatacttgagcataatatgtatatccacaaaacgttatagtaataactataaataagttttacctatttagtaaagctgttgctgaaagggctacttaaaacttattttgctcaatgttcaaatgatattcattttttgaatgtattttattcttaaatctcagtatcaaaaacattcaaatttataagtcttgtaatttaaactaaagagcgagtacctctggaaatagtttctggtagatgtcacctaataaatggggatgggttaggccactaaaagtaattgacattcaatttaaagtttaaagattgttgagagcatcaatttttatattctatcttgaatagcatattgctgacctctgcaattatgtttatagttacacccacattttagataatattgtagtgtttgtacatctctaatttatttgatgtgtcagcaatagaggggaaacaaacatataccaattccaattgtactcactctagtttgggtcatttgtgtactacttgtggaatttgaaaactaaaacacaataatgccatgaaattgagttgttcatcagatggaacaaggatcaagaaggttcctcaaagaacagacttggagcagcttccatttcaaatgcatagatttcacacactggctggcccttttccaccttctgaggaatgtcattcattccttggctttcccctaacagactcataaagaataccaggcaagtctgaatgccataaaagagttcttgtaggaagcaaatcaaagagatacatcaacataaatgatacttgtttaatcattaagattataatatggttcaaacatttaaaacaaaaaagtttaagagactttattccatgctattgaaatttggatcaagaagaaaacgtgaggaaaaataaaggaactatatatattcacagatgtattcaggatgcttggtctcattttaaatcacagcattagttttgttttggaatatttttgtgattaccagtttttatattataagtagttctcgtttataaacagacactgtagttttgtaagtaacagttttaaatcaaaaggcacagcaggtactgataacatagttctaagtaaatgctagtctgaataggcccaggtagccagccaccaattattgatttaaggatccttgtcttgaggaagtatgatgggtgtattgtgtagaaaacaaaagcaggatttcactggtccctttgccggtggcttacaatgcctgtgattgtcagcatgctgccaagaccaggtgttggtaaaaagacaccatcaaatgagccagttaacattttttgttgcaactgaagacatcacccatggcaatatccaataaattctgatggacatttccacactgacacagtctattttcacaaggtaaaaacttttaggatttacattttcatgatacattctacttcaagataaacaaactcacactttagatacatatatgtatgcctgaaaggatatatgccagggtattaatagtgatattttggaatgaatcaccaagttttttaaaaaaattttgtatgttataaagtttttaatttgcatgcatggctgataataaaaacattaaaactatctgaaccaggatattttgaataatatagaaaatattagtaacctaaaacaatgtttccaaaatgctttaatttatctagaacagattttgttgtgaatttgggttttttgaatgataataaaaacaaaaatccttaacagataacactgaagcagggctttttttccaactcatactgatatttctttgttgagggaggccaatctgcttattattggcatttgtcacatggtaggcttttatctccctgataccatcagtgcctattccttagttgtgagaaccaaaaaagtttccagatcttgacaaatgtcccttggaaaacaaaatcacccttggttgaaatccactggcccaaattaatactatacaaaatagtctctaagggttacttctgctagataatctgcctcaattgccctattgttcagtacagctgtcagtccttaagaattaaatgaagcttagttactgctcatctaagcatatggtggataacctctagatcatcataattagctgataactaactacttctctggtaatcaaattgttgtttttccactttgaactcagcatggagctctaggaaataatataaattaccactaaacttaaaacatcaaaacgaggttgaggagaataaaagaaagagaacttctttggtcataaaggagcaaaaactgaatgcacccactttgcatatgcctccctcttgggaccttccttaaatcccacagaatgacagcatgtcctcctctgttcttccatgcttcccctatgtatgtattctcattcacaatttgcttccactggggtggagttttgaagggtaaacactttcaacttctttggtttggcaatttaggatcatttattcttttattaattcattcaatcattcttacatatccgtagttattagcactgtgattaatccatacaagggaaaatacagcactatggagctagggagatggaagagtattggggaggcctgcttggaggaagtgatttgaacaatttgatcagcaactggaggaggtaggaggcagggggaaaggaaaagcaggagatcaaaattgctcactgggcatgattctaagcagtactgctttgaactggcttatacagtggctagggaggcttttctgattaaagattgattagtgcataaacaaacaaagatgaagcagaatgaaaaaactgagaaagctgagaggtagcacagcttgcattgagctcaaggattttctggttcaggttacaagatgcatactttgacagatctccaagagaccttaaggtacctttggccaagctcaggacccctaagaaggtcaacttatattctgtattgcatatcttaattctcctacttcttggacataacccaaagataacctatttataatagaacacttctttgataatatctatatgacatgttgccaaaactaaagatactgcattttgtatagtgcttctaattcttactagactttaataggaaaagagagcattaaagtctttttgctaatattttcagagttaagtattatatgttcttcagtttttaaagggtaaaatttagcttgtcacgcaattctgacagtttttaaaaacatttatgatacctttaagttttatatttaatgaaaactatacatatatgtannnnnnnnnntttttctatacaaggaacaatcctgtcagaaaaaagaggacatccatttctagcccaaagtaaatagtcaaacagaatatcacagctgatagctgacatctttttgtaaaggagaagtcaatgatagctatatataatacactcaagtctttctgacacagctggggaataaggaattctagtcaaatattctattcaataaggttaccatatattttacatggatctccggttttcaaagagttgcaatagatcaaaaaacaccgaaggctatgtagctagggtggtcccagctgagctcaaaagggaattatctgggtgtatgtgattaactagagggagttggtaggcccttagggctctatttgcatgacaggatttatgctggcattttatttattcctgatttctgggacaaggaagatctaagcttcgatgactgaacaaaagagaggaaggagggcagtgaaggggtttatggtattagaaagtatttcaggtagctaggactgaaaacacttttgaaaacatctaaggaggaggggatcgggagagaagggaaaggaactgtttttatgaagtgttctatgaatcatgactacttatgcactaaaggatttgtggcaaaaaaaattggcacagaaggatattatacccttggacctgtggtccatatttctgtggaaggcaactccaaacagctttatcaggaaaaaaatcttgtccagctgggaactagagaaatatatgataaactgggagaggcagtgacttttgttttgttcagtctcctagctggcttgtgggcaaatgtcaaagggtaaccataacatgttgtcagcatgtatgcatgtgtgtggctactccagatgcgcccactggaatataggctataggagtttgagttcagtttgaacgtgggggggggaagagattattaggaatgtttggattattgttactaaggcaacctgcttctgaattcctaagcgatgagacttggagacctttagcttacaaggaaaactaaattattcaagacgcacatgaggatcttgcagtttttcaaggtcatcttcacaatatcaattagcagtttattggcaaagaaaagagaaataaacttatgaggcatctactagaggcttgggagtgataagattctagacaatggttttattactgattaagacttagttaaaaatgtatttcatttcttactaagtccatcatttttccctttcttttttaaggggtactgtactaaccatccctttaaatgccaagaacttgggagatgagggttttaaaatgtgtcacagtaacttagtcctcttagattagaaattattgacaatatttttatgtaaaaattctcccttgcctctttaaatttaaattgcctttaataaaaggaggaaaatttttctgaatattatcaatttagtctcgagtctaactaattgaagatgctcattttcattttccagttccagtttagactcagggacaatcaaggcattgtcaaggagatgatggcctaagacaggtgaggacttcttaaaattaagtgtgtctatggcctgagaaatgcctcagtgtttcagtggattggctgcttttctagaggacttaggttgacctcctataaacttcatggttgctcacaaccatctgtaactctagatctaggcttctgaggacaccaggtattcaagttatgaatagacatgcattcaggcagaacactcataaaatatgaggttttaaaataattagagattagagttacacatcaaaattttaagtatatccataaatgaacatggttatacagagattccaaacaagaagttcagatttttttttcatgttggttggattttcttctagaattaatgcagtttcctataacatttcatatacttcgagcagccgcttttctgtgttttgttctgtttttgtaaaattaaaggggaaacttggcattgtggtgtatgcatgtaatcatagcactaacgagatggaggcaggaagaccaattaatttgaggctagcctgagcacataaaaccatgtttcaaaacaaagctaagagtttaaaggaatcatttttttaacacagatggaagtttatttctgagaaccacacatatttggccttagttgttataattccctgtagcagcaactaactagtttaacaattacatgatactctgtcagactttctttagtattgatcctagattacaaaagtttctctctgctctgtcacagtctagtatttcttaggaacccattgtttttttctgcttctaccttccagatttgatgtttcctaatgtagaaggaatacagtcagtattacagttaagctggcacatggtagaggtctcaaactaacatagtgtccacatttagaaaaaattgggaaaaaattagattgagtcaaaaactatttcagaagtagcattattattatacaataacacagaacttcatgatagcctgttacaattcagcctcctaacacttcaccattttattgcttatttaagagctgttaccaggattatttatcaaataaattcttacatgtatttgttttgctgggggaaaatctcctgggataattaatagttatgaaaacatctttttagttcagtcaatacatttaacaactttgcaaagctttattcctatatttctaatatatgaagtatagaatgaggaccattctatacggaacaaatatttattcagttcctgggtaacatattatttattaaaaacactcacacacacagacagaagcagcaggaaactgacagatttaaaagagaaaagaagtcttttctataatttatttggagctatgaaagttattgaggtaaaatactagcctcaaacactttcccaacagctgaaattaatttttatattgtatggtggtgaaacatataaggctcactggttttgaatattctattcaaaatatctcaaaagaaaaaagggtatttgtgtagtcaactatttgaactagtagagtgattgaagcataaaggagataaacaaaaaaacaatgtttagaaagtatataaatatggaattgaggttctcccataaaacattcaatttgaatttaagagttattaattaatgttgcctatatgccattttaaaaactgatgaaatctcaggtaaaagaactaaaaaggcagtatacattatgaaatttgagatgtttttaattatatatattatatatatcagatacatatatatttacattttgattaccttcaatatactcactagctgaatgatagacaatatgaatgatattaataacaaagagcaccactccctagatattacctaatatctttttccatcatttgaaaaaggacttcatccgtaatgtcagcttcttttctttctttctgtatttcttatcactcagaagatagctctctctgaggaacctttttttggtatgtgcattttgtttatgctacacatgccaaatagatctcccaagatgaaactctgagctcatttggaagtcatttttggtagcacatgaatcagaactcttattttcttctcagcactactggtattttattgcttccatctatagtccaatatgcttttagcgctaagaaccctgaggccaaacacacaaagcactaagaaaatgggaacttctagcgattccaatttttgtctctctttcagggttcttctctcccctgagagagtgaaatcactttaagctcaccatgaaacaggtacatggtgagcatcagtgattgcctgatgctggagatgttgatttaggagtctttgacttataggtcaggtgtaaaacccttaaacatgcttgtcaaagtctgctggtcaaattcctatggatttttccagactctgctcaaatgtcaaggtccttatgaaggcttttctggccaccacaggcagaattaggcaattcctactttgtattattactatatcctagcatatttctatatgtcaggacacagtaaattctaatgcatgtactggctgtactcacggaatggagacaaactatttcttccctttatttctggcccagaacatcaaatcatgttgattctcaataaataattgaaagaatggtcagagaatgaataataatacccttcatctgcacattatagattacaggaaatcaatgctcagagaggttatatgagcaaacccaagttcaagactgtcaataagttgcacaccaagtttgcatgtcagttaagttatgcacagtaagcgattaacaataatgatgaaagaaataaattatagcagtatcttaagataaacgttatttaaaacctttgagttgtttacctcttgaatcttttatttaattattgagatctataattgatctgaactacagaaagtaaaactactgataggagtgttgttcatgtgttataacttttatattttgaaaattgattacttcttatgagctatcatattgttagcagatcagattactaattataggtgagctgaaaagttaaatacgtgtcttcattaagggtcaaaggccaacctcagcttttattctcagcaaagacttgaaaagtaattatggtatttaacaaagtttggtgtactttgtactattatcagagttgttgattcaactgctgagatataccctgatttgtatcttaagaactaggaagtggttcctccaagcctattcttatctaacattgtctaaaccatttaatgggacaatatcactgactaacagagtcccacttaacaaataactgtttgagtgaaaagagcacacctcaaatgacaaatagtgtggctgttaactgactttccttcaggagaataaaaatctataacctgaaatcagtacagttattagatatataaagatatcaatacaagttcaaaaaataaacaacatgactcaccatgttttaaaatatactactcaccaaaaatagggttctgaagttgttgagatcaccaaaaaagtcttctatggctactgtgtttgggtcaaaaatgaagtattctcccaggttctcatagagcttcaccatattgttgtgcatggtcgacagtttttcatattgctctctggcattctttgtaaagctgtaatttgcgttaaggaatgtggtccaatgatatttcagaggtagccactagatgacaaatcttaataaaaccatttcttctgtaaatatatttatatatttgtttactagaactgccattataaagtactttcaacaacacggtttattttttttttcacacatccagaggctagaattctgagtgaaaagtattgggatatttagtttcttatgcagtctctctctcttgggcttgaagattgctgccttcttattgtgtcctcatataattgttcacctgtttggttgtgtgttttcaaatccccatttcttaaaaagtcacctgtcatgtagcattaagatataccttacaattttttaaatgtttattaccctttcaaggctctttctacaaatataccttttctgaggaactttcagttctgaggaacttagttgtctagccttcaatacatgacatatggggtgtgcaagacatgtcatacaattcagtacaagagtttctatagttatattgcttaccaagtttgaaaatctttcaattggacagaaatatttaatgtataacatgtatacatgtttgttagaatatgtttgctaaatatacatcagaaaactacctccatttctacatgtgggaatttatacatttatacacatgcagaaatacatacaaaatatacatagcccatatgaaaagggaaggaacagaaggaagaaaggtctctctgacattcctttcacgttcttcctctaaagcagtccaaaagagaattttttgaattaccatgtgaacaagtcctaagactgtcaattcagagatgcccactgaatacctgtaggaaaaggatgccgttgcctctgaagaacatcatagagaaacacctgagtgtgtcttgttgaattgctcccattttacataccattttttctcattgatgattctccatgacagtgtatccttcttcaaatgttatgcttaaaatatacactgatccctcattggcattttcattttgtcatctctcatgtcatataaaatgtaaatagccatgtgatggctcatgcttgtaatcacacattcaagtttaacctgtgctatacagcaagaccttgtctaaaattaaaactatatataattatctatctatctacctacctatctctatcaaacactgttttagaactattgaaaatgaaccttttataactaataaatataaaaccatgaatgtgctgacaaaatttcgaggtctggtgtaagtttgatgaatatttaagaatatttgtttcttgtctttcctctttggctacataattgttgaatgctaattcataagagtgattgagagaacagtaagggaataattatgaagaaaagaggaagccaaataaatatttaaaaactagagttaggttaaaaattaaagttaaaaatggttggtgatcacagaagtaaaattgtaacatgggtgcaaatgtattttggttggcataccactcttgttttactattggaaacaatgcagaaatcaggccatttccctaaaattactttgtaactgacacttacagtatataccatgatttcagaaatgatgtatcatttatccatggtctttttgatattacttaactattaacattcactctcttctaacaagtgtaattaaatcattcaaccctcaaacctattttgacattaatagacctgaaagaatgaatacttttgtaactgcctttttcataaaatgcacatgcttcctatacatttttattttattaatgaagagtatcaccatataatttttgattttaacactgtgtacagatattaaacatcctgtttcagtggagcagaatttagacactagtctttatttctaagcacagaattaaagtgattgttttatttccttaaacacccctcaacacacacaaagggaaaaaaagaaaaaaaataagactcatgccagaaacttactgggcagaaacaaattgcaaaggtcacttatgtgcaattatttgcaatgcagattactaaaatatatatttcaggatgctcaacctctgtaaaccagtggagaagtgaaagctaacaagaaagacaaaggtcttatccaactcatttatcctggtatacttttttggaggctaaaatatgtgagtgtagtgatatacaattttaccaatttgtttttacaggcctaaaaatgatttcaaaaatactgtgttccaaagtgagaagttacagaattctatgaatagtttctttgcagtaacaaatggaaagcagcatggctttacttatctttacagttattattctctaaaagagatagatgtttcagccctgaaatatttcacaatcacaatcatgccaccaaatcgtacatgggattccacattaaaacaaaaagaactgagcatgctggtcatggtgttacccactttgagaaaaagctggtagacctctgtgagtttgaggctagcatgttctaccaagccagctgtggctctacagtgagtatctgtctcaaaaacaaatatgaataaaaaacaaacaaacaaaaaagaaaaccaaaactaaacctaaaagacataaagagaaagattttaactatatagctctttgtatacaatgttactttttcatgcctttattttaattataaaacttaatttttgaattgccactaatgcaagatcttatttagcacttgttattgatgaaataataatcaaagccttagtctctatcctgaataagttaatatcctaatattacaaataataattgcatcctcaattgacgtttgtatatgactaaaaatataaaacacacttttctttgtattatgttccatatttttttcaaatcaactttttctctaaagcaatgaaattgcactgttatagttttaatttgtgggcattaaatagaagtcactcatccatacaatgtttgcacacttgccactaaataaatgaaatggaataagaaacaatatatttttcgtgtatgtaatgggtgactcacacaactgtagctactagggaggctgaggcaggaggaatttctacttatgtgtaagatgaagtaagtatctccttaactggaatatgtctatagagaaggtcagaagtatgttttattagcagagacttaaactgttcctattccatgtgactatttaagattgaggataaccgatttcaggacatatgctgtagaatactgtgaatgacttactaggtcgaaaattttgctctaagctgggttttgagaacactcaaaagaagcagatggccaggttcagaatgcaggaagatgcagagggaagttttatggtgggcacagcgtggaactatagtcaacttctaccatagttctctcaggttccacttaagacatttgtaagaatgacaacatcatggggcatttactcctgaatgtccagatacattggcttagatgccacagaacagtgaccaaagctctaacaatattaaagagtagggttctatgaggtctagtttctgctgggttcaaaagattcaatgcatacttccatctattcaaaaaccctgaactattcagggaactctgggaaagccatgaactttctatgaagagggtaattcaaggtaatttacatgccacattaaatatacttgtgtggtggtgaggtagcacagatccatcatataaagtaatcaaatataagagagcaaaaaagtcatttcaaactcctttcctttcactagactgctttcaaattctttgtacaataaagaaaactcttcagaacttttaaacatggaacttaattaagaaactcagaactagacaggtggtggtttgcatgcctttaaccccaacacaaaagaggcagaggcaagtggatctcttgagttggaggccttggagttggaggtggatctacttgttctgtagaccaagctggtcttaaactcacagagattcgcctgcctttgtctgctaagtgctgggactaaaggtgtgcaccaccactatctggctatcaaaagctttgatcatttatatttttgtggctatgtataaatttctaaagctcacatgcctattgagttaaaaaacagtatggacttaaaattcaacttgagaaatccaaatttcctccatagtgctcacatagaaagaaaattattttctttttacttcaatgtacattttatagctatttgggctcttaaaagcagttacatctacctgccaatgcctggatgctctccaactggaaacagaactatttcagatgaggtagagaaaactgtttctcattttacttaactttgatggacagagtaattattagtaaagaaaaagtgttttattgtaagtggaatgagcattagcagagcacagggggtgaaggagtctatatatcatgtggctaattgagtcaaatcagttcttaaaactttcatctttgtaggcagcacattagttactaacaattttaataaaagcttgaaatattaaatatcattgctggtggattgttggagaacatagaaaaatcaatttgagatccacttaaccttcacacaaattttggtagcaacatggtataattgcccatttaaataaaaggatgtcataaatgcagactctattgaaaaatagtgtttgtaatttttataacatcagaaaaattcccataaagtctaaaaataaatatgaactttccatataacttgaataatttctactgagaaattagtatttcaaataattaactgtaaaatattattgtcgcaactagttgaaaatcacataaaaactatatattgtctggtgaatgcatcttgacaaatattttaaaatatgaaacattaataagaatagtatgtacagcattgcgtattactataatactccatgatagctctagatatggaataaattttcttttaaaactcttattacaaaatggaggcagagaacatttgagtaatagaagatttcctattaaggatattgagctcaaattccaagttttgaaaatatagaatgcatttatagtgccagagggatatattttgtaataaccagacttttccacagatagactgaacaatctagattttaaaatgttttaaaatcagcttctacacaaacagaagtccaccctgtagttttccttttgtctattctttatccaatccattttgcgcatttattaagtgcctactatgcaccaaatatcttttagagaatgaaagcacagctatcaattttaaaggtcattgcttttctagaaataagtttactcgggattccgggcccccacagagtgcagagtccagaggtgagctgatctggcccctaacttggacccaacttacgcctgcccgccctggcaaatcccgccctgggaactgcaggcagacagaatcggtccctgaggaccttgggatcctgtctccgctgagatcgctaggccattctggtcccccagagagtgcagaggtgagctgattctgcccctaacttgggcccaacttccatctgcccaccctggcaaatcctccccaggaatcttcgacaggatgactcgaaccctgaggaccaagtaactcagagtctgctgacatctctgagccagtgctgatctcacccatctggagagccagtgcctcagacctgcctgcacccaacttgaaacgcattagagtatcaaagtcaattgcacacacctgaagagaacaccagaaccatacacaccaggaaaagaagtgataccagctgtacccactggaacaagagatgggaagacaacaatataagaacacatccaacaacaggaaaaccaatatgataccaccagagtctagggactatacaccagcaagacatgaacatcccaacacagaagaagcagaagagagcaactttaaaaacaacttcatggaaatgatagagaatctaagagaggaaatcagaaaatccttcagagaaatggaagaaaagacaaaccaaaagatgcaagaaatcaaggaaagccaaaaaagccaagaaaatacaattaaacagctgannnnnnnnnnnnnnnnnnnnnnnnnnnnnnnnnnnnnnnnnnnnnnnnnnnnnnnnnnnnnnnnnnnnnnnnnnnnnnnnnnnnnnnnnnnnnnnnnnnnnnnnnnnnnnnnnnnnnnnnnnnnnnnnnnnnnnnnnnnnnnnnnnnnnnnnnnnnnnnnnnnnnnnnnnnnnnnnnnnnnnnnnnnnnnnnnnnnnnnnnnnnnnnnnnnnnnnnnnnnnnnnnnnnnnnnnnnnnnnnnnnnnnnnnnnnnnnnnnnnnnnnnnnnnnnnnnnnnnnnnnnnnnnnnnnnnnnnnnnnnnnnnnnnnnnnnnnnnnnnnnnnnnnnnnnnnnnnnnnnnnnnnnnnnnnnnnnnnnnnnnnnnnnnnnnnnnnnnnnnnnnnnnnnnnnnnnnnnnnnnnnnnnnnnnnnnnnnnnnnnnnnnnnnggtagctatccttgtatctaacaagataaacttcaaactaaaatcaatcaaaagagatgaagaaggtcatttcatattcatcacaggaaaaatctatcaggaagaagtctcaattctaaacatctatgccccaaatacaaaggcaccaacattcataaaagaaacattattaaaactcaaatcacaaataaggtctcacacaattatagtgggagacttcaacactccactcttacccctggacaggaccaccagacagaaacttaacaaagagacaaaggaactaacagaagttataacccaattgggattaacacatggaaccttctcaaaaatcgaccacattcttggcaacacagcaaacctcaacaggtacatgctttaaagatagaaatcaaaaacaannnnnnnnnnnnnnnnnnnnnnnnnnnnnnnnnnnnnnnnnnnnnnnnnnnnnnnnnnnnnnnnnnnnnnnnnnnnnnnnnnnnnnnnnnnnnnnnnnnnnnnnnnnnnnnctagaattcaatgaaaatgttgacacaacatacccaaacttatgggacactttgaaagcagtactaagaggaaagttcatagctctaagtgctcacatgaagaaactagagaatagccacaccagagatctgacatcacagcttaaagctctagaaaaaatggaagcaaattcatgccggaggagcagatgacaggaaataatcaaactgaaggcagaaatcaataaagtcgaaacaaagaaaacaattcaaagaatcaatataacatagcgttggttcttttagaaaatcagcaaaatagacaaacctttatccagattaaccaaaagacagacagagatcatgcaaattaataaaatcagaagtgaaaagggggacataacaacggacactgaagaaatccagagaatcttcaggtcatactttgaaaacctgtacttcacaaaatttgaaaatttaaaggaaatggacaattttctggatagttatcacttaccaaaattgaatcaagaannnnnnnnnnnnnnnnnnnnnnnnnnnnnnnnnnnnnnnnnnnnnnnnnnnnnnnnnnnnnnnnnnnnnnnnnnnnnnnnnnnnnnnnnnnnnnnnnnnnnnnnnnnnnnnnnnnnnnnnnnnnnnnnnnnnnnnnnnnnnnnnnnnnnnnnnnnnnnnnnnnnnnnnnnnnnnnnnnnnnnnnnnnnnnnnnnnnnnnnnnnnnnnnnnnnnnnnnnnnnnnnnnnnnnnnnnnnnnnnnnnnnnnnnnnnnnnnnnnnnnnnnnnnnnnnnnnnnnnnnnnnnnnnnnnnnnnnnnnnnnnnnnnnnnnnnnnnnnnnnnnnnnnnnnnnnnnnnnnnnnnnnnnnnnnnnnnnnnnnnnnnnnnnnnnnnnnnnnnnnnnnnnnnnnnnnnnnnnnnnnnnnnnnnnnnnnnnnnnnnnnnnnnnnnnnnnnnnnnnnnnnnnnnnnnnnnnnnnnnnnnnnaaaaaccacatgatcatctcactagattcagaaaaagcctttgacaaaatctaacaccccttcatgataaaggtcttggagaaatcagggataacaggaacatacctcaacataataaaagcaatatacagcaagccaacagccaacctcaaattaaatggagagaaactcaatccaattcatctaaaatcaggacaagacaaggctgtccactctcgccatacctcttcaatattgtctttgaaatcctagctagagcaataagacaacaaaaggagatcaagggaatacaaattggaaaggaggaagtcaatctctcactatttgcagacgatatgatagtctacattagtgactttaaaaactaccagggaactcctacagctgataaacaccttcagcaaagtggcaggatacaagatcaactcaaaaaaatccgtagccctactatacaccaatgacacattggtggaaagaaatcagagaaacatcaccctttacaattgccacaaacaacataaagtaacttagggtaacactaaccaaaagagtgaaagacctgtaccataagaattttgagtctctaaagaaagaaattaaagaagatatcagaaaatggaacgatctcccatgcccttagataggtaggatcaacatagtaaaaatggcaatcttgccaaaagcactctacagattcaatgcaatccccatcaaaatcccaacccaattcttcacagaccttgaaagaacaattctcaactttatatggagaaacaaaagacccaagatagccgaaacatccctatacaataaaggaacttctggaggcatcaccatccctgacttcaagctgtattacagcgctacagtcctgaaaacagcttggtattggcacaaaaatagactggtagaccgaatagagctgaaaaccctgacattaacccacacacctgtgaacacctgatttttgacaaacaatagaattaaaacaagttaattatgcaaagcgtctgatagtgcctggcctaggatgcctcttcagtaagtattggagagcagaaagcttccctgtggagtctgcaatgaggatgcatcagcttcttccagagtcctgggcccccaggctcatgcatatctctggggcagggcaggaagggaatgaccactgtggtcatgatcctgcaaggatatccagatttctgaataatgacaaacagggaggagactctcccacccacactccctaggctgtatagcatgtccctgtgtagacacggagcatgtctgattctcagaggaagcctggctaatatttcccaggggattcttcacattcagaattcagacaaattgctgctttttaattaacagagccccgacaactctgttatctgtcttctcatgaatctattttctctttaatcccttctcatttaggatcaccctgtaagggtctgtggatgctctctccctcacgccttattctagtgcactcactcacccttacgatggtgtgagatggcacagtgtctatgtgatgacatgaagtgaggtgaatgacaggctctgtgacagtgttaagccaccatgtaaagctactttgaaaaagcaagaaagtgccacagcagtcggtcctgtctgaaacagctacctagtaacaggcatggtacatgcagctcagatagatgggacaaacagttgactcatgacccaggagtagtaaagttatatgcttgccaaaaaaataaataaaagagtgacacactggaagacaaatgtcacacaatttaaattttatgtgttannnnnnnnnnnnnnnnnnnnnnnnnnnnnnnnnnnnnnnnnnnnnnnnnnnnnnnnnnnnnnnnnnnnnnnnnnnnnnnnnnnnnnnnnnnnnnnnnnnnnnnnnnnnnnnnnngactatgtgaagtcttgaggtctactgagagcatgataaatatggttgataacaatacgctatattttaaaagttgtgagatagtatactttaagtgttctcaaaacaaaacagatgaatatatgtgatataccatgttaattggtttaatttagccatgccattgttaacatactgtattgtgtatcataattgtgcatgactttatttatgaactaaataaatgaatgaaaaaaagaaataagtttactctgaccaaaaaatcacaaattatattttaaattgcaaatcaaaacatgtggttaaaattcataagctgcccaataaatgtacatttgggtccaataaaactcaatcttgggagacacagaagtagagcacaagactagtagtgcaacaataagaatggaatttaagctgagagctgaatgtggacaaccagttgaaggagcactgagggtgagaataaatgaagagtattaaatattctagaatcacaaaaagtactaacatctacaatactaaagtccatgaagcaaatggaagagagaaaacaactaaagaagcaagtagggacaatatttcatgaggcttatagattttcttaaaaaaattaattagaaagaagattattttacatgtcaatctcaggtccctctccctcccctcctcccgtgccaccctacctatcccataccctttctgctccccagggagggtgaggccttccttaggtggtcttcaaagtctgtcatatcctttgggataggacctaggccaaccctcttgtgtctaggctcagggagtatccctccatgtgggatgggctctcaaagtccattcctatggtagcaataagtactgatccactacaaggggccccattgatttccaaggtctcctcactgacactcacattcagggattctggataattcccatgctggtttcccagctatcagtctggggaccaagaggtctcccttgttcaggtcagctgtttctgtgtgtttcaccagcctggtatggacccctgagagcaagataagacatgctataatagagggagacattataggtttaaagagaaatcaggcactagggaaatgtcgggagagctacaaagatgacaccaactaataatctaagcaacataagagaatctaccttaaatgcccttccctgataatgaaattgatgaccaattcatatgccattgtatagccttcatccagcagctggtggaagtagaagcagacacccacagctaaaccttgaactgaactgatatccagttgcagagaaggaggactgatgagtctttttgatgttttactgaggaaaatgtcattgaacagtttaaagaagtagtagtcagacaaccaaaatttacaaccgaaacttataggtttaagggaataaacatggaaaataaaacaagtgtatgttaaggttttgaagtgttccttgtaagcagtgaataatcactgttttctatacagagaggtaatgtcatactatgaatttagctagaaacacaaatgaagatggtacagaaagtatgaaactggtgcagagagagcagcacttagcaagcctacagacttgccctgcaaatagaacatcagggatggatgtttgaatataataaacacatggaaagccagacatggttgtacaaccctgtagtctcagaatcgaggaggcagaggcaaaaagattgagagttcaaggctaacctgggttatatagtgagatcttaagaatgaaaacagaaatggaggaggtatattccatgagctatgaataactacataggtgcagttagaagtaattgcaaaagaggatgtcacttgagttttgagtgtgtgagactccaagtatgtttttcataagtttaaaaacaattactttatactttttaattatgtatataggtgggtatgtaaacattagctcagaggatagaagagggcattgaatgaccctggagctggagttacaggtggttgtgagctgtctaacatggtttctgggcacttaaatcatccagtcctcaactgttaattactgaggcatctctagatacataacaggatatttttttaaaaaaaaataaaaataaaaataattaaaaaatgacaatttgaatgccaagagaggaaacactatttagagggagagattggctagttttgaacatactgagcttaagacatccatgaaatatatggatggcttctcaaagggagttgagctatgtgggtaacttggttaaacagagatttggaataagcagtagagaccactggaaagtcaaagcaagatacagaagctggaagactcatcttgtgttatcatatcttgataggaatgatgtattgttcttatgttggttcaaagaatacacttttagtccaaataagactggcttaatatactacttcatccctaataaagaaagaatattctggcaagtctagttagcagactaaaatatcaaattctgtagttaaaacttcgagtgaagggctagagagatggctcagcagttaagagcactggctgttcttccagagaactcaggttcagttcccagcaaccacatggtagcttacagctgtctgtatgtaagtcaagtaccagggatctgacaccttcacaccaatgcacataaaataaagatttaaaaaaaaactttctaaatgaattgtcactgtgaccttggtcaaacagtaggcagactgaattttcttgttttgtgtagtaacaaaattaaggagtcagggaacaaaacatttcaagaaatgctacagattcaataacaaccatgtatgtttacaaaatttgttaggaatggtgagacaaagtataggaaaatcactccttgtttttattttttcaatctctgtgtgttttaatatctatggcatttacatacttctgatacaaccttgtatgcatgtatacatatttgagttactgtgccctttaatatgattctttgaattctcaggcattgtgttttccattttccctgattgtatcagtactttccctatatttatttgccaagtgcctatttcaggttttcaaattgtaatactgaatcagaaatagtttcatcatgtacttttaattagctagtaccttcactttcaggcttgattttaccattcttgttcattttatttacttaactgcaactaccaacaaagtaaacaaatgggaaaagacaacactatccactgtaaagctttaacaactgtgacatgacagatctagatcctttccttgcccatttgtcacgagtagattgatctataggactcatttcccataatttggttgcaaatcaaagacattaccatagaaatccttcatgggtcaatctagctttaaaataccagagtgtataaatatcaaggtaaagtagaaacacaaccattttggaaaaggtgtgtatagtgaaaggtttcattcaaaagagaaacaaacagcaaccagagccatcttatacatatatacatatatataaatatatgtacacatctatgccatatatctgagtgtatgtatacaatacacacacacacacacacacacacacacacacacacacacacacacacaatgtagggtctcaaggagcccaggctgccttcaaagttgctgtagtaaaaacgtgaatttttgatgctctgactttcacttcccttttgctggaattagaggtatatactaccacatgcagttttaattagtactgtgcattacacttggggcttcctgaatgctggtcaaacactctaccaagttaactacatttccagcaggtacatgaatcttatgcaaatagaaatattagaatatattacttaacctggttgcttaattcatgtaatccttctgttctaggcacttgacggcataaacggaccttctacgtacatggcaataagaatttatcctagagcaaacttgttcaaagacagaaatgttcctgtaaaataaaataatagcactcactgaaggacagttttatattttctaacccaatttcctattgaggactctatttcgtttcaatttaggctgtttgtaacccttgccactaaacttccaactcctagttccttaagctttgaagacttctgttcatttatcagaatctattcatgctatacacttatctaaattatcccagatgatcctataataacccttttccttaactttgatatcctcctcagttaatataacttttttttgtagtggaaaggaagtgcatttcaagatataaagcgctttaatctaatacatcagtcatgacagtcaaacatttcagaatgattctctgaatttattcaatatagatgatagcttattctggtccaactcaggggctgagtttttcactagggaaattttatttctgtttctaatttacttttctgaaagtattgttttgcaacctattcctaatatacttcagtaaagctttattccttaaggcttccaaaaacacatgtgtatttatatgcatgtatatatggaagaatcaattatatttctagttattagtggattctatattttctgatatcaatttaatgtatgtctcagtatgaaatagcattagttaattctgaagatattttaagactctacacttggaagaatctatttggataccatggcattatttccaaagggcatgcttcttttcacttttcatttgttggagacataagaatgcagctgtgaaaagtttctgctaaagaaaaaaaatgtttcagtagtgtcatttgtggcatggatataaagtgagctgcagatctacctaatgtgtttgctgcccctaggtttctgatagctcaaaaaatagatggtcttaggaatcacatatgttctcttcatcaatgtgttattcaaagacagaacttggacttcaaaaaaataggaaaagacaggatattgaggtgacatctgcccacttatgttcactaaagcagtaatcccaatggatacaaaagaaccttcacctacatggagacatcaatctcattatagggacagagcatttaaggtagcctttccactattgcttagattcttggttggggtcatccttgtgggttcctggagatttctgtactgcctgatttctccttaagcccatagcaattccttctatcaaggcatctctttccttgctctcctctgttctttccccaacttgaacttcctgatccttcatgtccccctccacccttctcttctcctctcttctttctcctacttctcccctccctccattctcccaatttactcatgagattgatgactacctgaaattccatcatagagccttcagccagtagctgatggaagcagaagcagagattcacagctaagcactcctggaatccagttgcagagagggaggagggatgagcaaagggattgagaccatgctggggaaacccacagaaacagctgacccgagtacatgggagctcatggaccccagactgacagctggggaaccagcataggactgacccaggaggcctcctgtatgtgggtgtcagctggagggcctgagcaatctatggggcctctggcagtggaaccagtatttattcctagtgcacaaataggttttgggagtccattccctatggagggatactctctcagcctagatacacagggtagggcctaggtcctgctccaaatgatgtgacagactttgatgattccccatggtagacctcacgaggactggatggggggcctggatgggcatggtgggaagaagaggatgacagggggagagggaactgggattagtacgtaatttaagattgtttttaatttaaataaaattaatttaaagaaacatggagacactgtggtatacattcacaactagaataatatgccagtgtatacacttgcctcttcccgcttacttgctttgttgacatttcagctgagtaagaatgagaaatggtaacttaaatatctgaatttgaagctactagttaaactgaaagaacatgaatagaaactatctacaattcagtattacaaatcccaagccctgagtgtcctattatttttgaaaaaagatgttaacattgtcatatgtgacaacatagacggactgtcagaacacgggagtaaataaacaagctagttacacagaacagatactgtatgatttcatttgtacgcagtatcaaaatcagccaaagtcacagaaggtgaatgatgctttccagatgctgtgttgtgatttcagaacttcagttttgcaagcagtaacagttctgaagagctagaccccgagttaacaataactgtattccatattgaaagagcattaaaagggaaggcctgatttaatggtggtttctccagaataaggaaggactagctatacacatacacatgtggagagaaccagaggaggccaaaatctgacttagatctctaagcattctcatgcctatgcacaagcttagagtagagtatccactgatttcagtttttttcccattggcaattattaaacatagacattgaattggctccaagaagtaagtgtgtgtggggggagggagcgtgtgcatgtctgtttctatgagtgagggaacatggaaaatttctaggaggtagactctgacacctacaatgtagagctactctgcaactctgctaggagaaggtcactgagtgttatgtggagttaacctgagaacagcagtggagttggcaataacttctacaactgaaaaattctgactcagttcatcaggagtagagggtcttccaagtattctgctcaatttccattcctttggaaagcaatgaccccttaaagtaactaaagcagttaatagaaaaagaaaataatatggttgtttccagaggctgagtggaggagaaagagaagggttgctgttaagtgggcacagaattttggttctgtaagataaaaatattcgatcgatctgctgaatcacactgtgcctagtgctacaggctgcctaagaatactgatagtagaccttggcttgtgtaagtccattcagttggaaagagaaactccaagaaacagaactattgttctggctgcagtggaacaaggtgtggtggggaatcaaacaaacaaacaagcaaaaaactaaaataaataaaagaaaaaccaaaaaggaaccaagaccaccaccaaacaacaaaatccaatattcaaatgctccttattctttctgtagtttttgtttttgttttgatttctgagacaggctctcactttgcaacacaggctagcatgaaaatcactatcacggaggatgtctttagcctatggtgatcctcatttcccactttcctgagtagttaggatacacgcatgaaccgcctctccaggctgggattctctctcttttttaaatctttggaatacattctgttttagcagggtgggtaaggggaaacaattttcacttacacatacacaaaatagtatttttctttaatctacaagtgcctaggcattgttaagacacatgagcaaagtgtgccagaatgttaggctgttagttcttttgcataaaacaatctaaacacatattaactgaatagcagatggcagagaaaagaaaaagttagattcctgtgtgggtgaaacacaccaagtaaattctgtaaagatggaaacctgggcataaaagataccatattgtaaaagcaaatggaatgtttcatatgactttttcatcttttcagcttttgatttatcctgtctttataaatagatatattctctctcattctctctctctctgagacaaggttttatgtggcccaggctggccttgagctcgttatgtagccaaggaccattctgtctcaagtactgtaattaaacctgtgtgtcaccatacccaggcttacctttgtacatgtaaaaagtatcttaaattcaggaggatacatgttaaaattatttatatgttttaattaatatcctatttacaagttagctttttaatccaaataaggcaaaagtggaaaaaataagagcaggtattagaaagtgttgctaagtgatttatatatttttcttgttttcatatttttgtgtacttgtacattttatcttgtttgtaacttaattttgtttcaaatgcaaataaaagtcaggattaaaatgaacatgtgaaaaggagtcattaaaatatgtgtgcatttactatttgctaagaaccttctgctaatgaaagtaacatctgatctaaattacactgaagctgagatgcagaaactaaacaagagcaatgacagatgctagatctagagaaaacaatgatacttttaaaagaagaatttaatattcaaactgatcattgtagagaaaatagcaagataacttagtactcaaacagctaattaatgtatttttacaagaaaagagttacgtgattaaaccagacttcaaagtactatttagcttgatgttttgataacagtataaacaggaaggcatatgccctgagctaacaacaactgaagaaaaatggttttgagagacatgtttgattttatacaaattaagaaggaattgattaaatgggttaaaaaaaagatgtgaaaaagctattttaaaaggcatataagtattagagaattgtcagacttaaaagggttacatttataagacaaatttcctttgatctttaattgacatattttgccaaaatccctacttactcttcttcctgtttatatttagtctgttgtctatgtataccttccagaaacacccaattaggaacacaccagtgaagcctctaaaacacaatggaaccatatacactgctccccaggacacatgtacatcaaatatcatggcaggtcatgacaggatctctgctactgtactatatgcccatttgcaaagcaaaagccaattcatcaaccacagacagtcaatgtggctcaacagaactgcagaccacagtgctgttcctcattgatggggcttggctgaaacctcacctcttgcagcagttctgtccttctgagaccagaattttatgcagtagttatcagtcagaaaatgccactgtatcaaccccttctaattttcatagcaaccatctctaagctctaagaatcaaatctgttttgcatgcatacaagcaagtcctaagtcctggacaggtgggtagctagctatttgtgtctttaattttgctaagattctaaaacagttttgccttaattagcttttcttctgagttattttgatgctaataatatatggctgttgcattccttgtacatgttcccaaacagtgatacaaacattattaaatctaatcagtgtttatagagtattccatatgctacccactgtgaatctttcgaaatgtcattttagtggataaagcattgggaaaggttggtatatacaatgacatgcttttgttccctcaatcagtgattttttataagaaaatttctacagatagtagttgctttcaatttatttttgtccacaatttgaaaaagagtatttggtttgttagcattctatagaacatatatttaaattaaaaaaacctttcagctgcagagtataattatttacatattttgactacattacagaaacaatgatctgaatgtcttcaagtgtattgcatttaaatgaaacatccaagaaccatgagttaaggaatatttagcagaacttgagtatggtggtacatgacaaattcccagcacttgaaagacagaagtagcagtcttgctgtgagttccaggccaacctgggcttcattgcttgctttttcctcaaaaagaatgcacagcaaaaaattaaaatgtgataccccttctaaaatacataaaatatcattaggaaaaaaaactacacaattccagacttcactcttacacaggacatttctattactgcccggattggaatattgctgtattttataatgtccttcttgatttttatattaacaattatatgagttacctttcttgttgccatgaccaaaaactgacaaaaatgtaacttaaagaaggaggagtttattttggtttacagttcagagtaacacagaccatcatggcagagaaaggcagcaggaggaagcaagactaaaatagactgtttcttttgctagttggctacaccagacagctagttcctgccacacaaagcttcagtgtttaaatacattaaaatgtgaaggacattttacattctattctcattaggtacaaggtcagtcaggcagtagacaatgtagactgttaatttacttcttcatacactgccatgtgcacaaatagaaactgtcaccacttgagtcgtggtctttaaactctaatatgagcaatatgtgtgtaagaaaaatgaactggttatgtaaatggtaacagtcttacaaagctgatatatattatgttatcactgccttcataggggatatagaaagagccagtctggcattgtctattgggcattaatacaaccttaaaactatatgggcctttcctgtttgtctactgcattaaaagtagtttcttttcgctcaaacttatgtgtttgagtactgaccatcacaatgtgtctgctagattagaaagaacaagattaaaaattaagatgccatcattaaaaatacaggagacaaaaagaaaaatatcctttaaaaacaggattcaaaaatgtatcctttgactagttcattgtataactgctgaatgagggtttgactgttttgccattttgctgattttaggaagttttttaaacacctggcaagcaggcattgtttttcatcctcaatgaaaggatttttttaaagaagaaacgggagtacagttgccacctgaacttattatttatgtggtacatctaacttttagctatgtgtgccatttatatgcttctcttattatggccttgtatataactaaacagagctctccttgtcacaagtttccaatcacccctgatgaaaaattggcagaaccatttgagaaagtggtttcccaaatgcaaatatcattattaaagtctttgaatcaccaaactctatctgtttaatatgtttcattgatagcagtttcatctgtagtcactagaatgtttatcttataatcggttatttgtagattcagattctcttacagttggttattagtaaatccacattcaattgagtactaagtacaaaaggtgacagtggaattgcagaattaggttcaacaatttccttggttgagctcactgttgtaaagacatcttatttttgagcatactttttaaggactgaagacaagttcaaaaacactacaatgatgaggaggtaggacagtttcaaactctaggacagcctgtattatgtagagagatctcatttcaaaaacaacatcaaaaccccacccatcaatccaccagaaagtcaggtcagaatacattttaaagggtttcaattggtaaagatataacatggtttacagaaatgcaaaaaaaaaaaaaaaaaaccttctgtagtaacagcatactttttaatcgggaagaaaagctaaaagcaaaacctctaatctaatttatgctgtgaatggaagtgttcattttagagggtttccttttcttcttaagaaactaatcaaaatcattagattccagtggactcacccaactctcccaaactgtacatattaacccagtgtctaagacttggacatggtctccaatgtttactctccatatgcctcaggcacacacatgtaattttgtgcttcaaggagtcagtgcttcataaaaacagagacgaatggttataaaacacacaccagtgcccgttggaagtaattaaaaatatggccctaccctgtattcatttcctcccctttaggcattgcctcttccacatcctaagttcagcttcccctctaactcacaaaacaaatctgactgctctttgtactctctcctaggtaaccatatgcttagacatacagatatgtgccaagattgatggtactggacatctaagtccatttgaaatgaattaatatgaataagtataaactgatgtgaatgccagttccaattcctaaagtatacaagactatgttttaccttgaaaacatgtttgtttgtttgtttccacatcaataactataaacaatatattttcattaaacaaagagagacatgcttttgatgaatgcataacaatctagttaatattaattttctaactctattatgtggacttttgtatttgactctaacatttgctaatccaggcacagaaataaaattctttccaaattgtgctgtgtgccaatatttctgaaacacaaaaattagcatgttatttatatgagtatgccagaaatcaaactatgtcttatattattttcagcaaacactggtaggcaattttatagatatgactagtggccatttaaaacacatactatgttctgaatagcaatgctatagttcacatgctatacatgacctcgggaatattcaaagcaaataatgttatgaagttctactatccacagtattcttaaatttttttgtcatatcactgcaaatgtaaacacaatttcctagtacacgattcagaggttaattctctagcactctcttcaaatccctcgctttgaaagaattgtataatgctattcaagtgcttcagcctagaaaatgtgctcctattcagtcatcttatgaatgatatcataaagggtaactgacaaccatagtgaacttataaatactaaatgaattagtaataaaatcgctcctaataccatctgaaattaaagacatagcctttaatgaaaacaatattttatacttttctttttgctcttctgatgctatgttatgtaattcaagtaaaagaaatgataattcctgtgattcaggaactaacacaagaaattatacaatggtgcaatacaagaatttattcagaaatagttatagaaaaacagtgcaatattgagagacaaagtcaaaggtgaagaatttgttgcacttggcccatcatgttcctggatttaagaaagaaggttctcgtgagggaaacgctttagtttcttgcaaaatattcagaactgattaatctagaagctatacttagacaaacagtcctttaggctgttaatccacttatggtttgggtatttcaagaaaatgaataaggttttttcatagaaatatgtctagctgtagaaaaattaactttcaaagagtacatttaatattaccaattaaatttatgatggtccccacaaattcttcttatacaaaagttcattgatcacctcctcagtacctgatggcattctagaattctaggtacatacatacatacatacatacatacatacatacatacatacatcacacatatacctacatacatacaaaatgtttttgaaatagggtcttatgtaactttatctttcctgtaactcgctctatagaccaggctggcttagacacacagagatccacttgcctatgcctcctgagtgcttgaattaaaggtgtgtgtcaccacgcccatctaggtacaaattcttatttgaaacaatattaggagacttttatatcagagattctttgaagttccggtgtcctataaaagagtcaaattttaactacaatggggaaaaagatgatcattttctaaacttggatgacaaccataaagtttctgcatcccactggacaagacaatgaaagacttgaaactccaaggactgctagataaagtaaatatcttgttggttgaccctgtatctaattttattttaactgtataacctgatttttcattttttttaaaaaaaagatcttggagaatcatgaattgaaaatattccaactcaacttgcagatttaaacagctaaactgaaaaagagtatcttgaagaacttccaacattcctactctggtctttgtttcagaaagaaaaaaaatcctgctacaggtgctccttaaagaatctcctttgagtgtccttatgagaaagcattttatgtttattatgttaataataatgacaaaatgagaagctttacttaagtttaatgtttctttaatcttgttactatcctttcttcattttgggggtgatattgaagagagtagtgatggtttgacaccttaaaaactgtaatcaagtttcagtgattacaatcacagacaaggtcagcatacggtgttcttaaagtggaaagaaacatagataattactactcccttcagtcacattcaggcatatgaataggagcaccatcgtcacattcctttgaaaatgcaaagagtcaaaattcacaattctattaatttctctctgttatcaattgtcaaaaaatattacatacgaaaagggctcagatctctaagatcaagatcactgtgatttagtgacattttcccattccaatcactgtatgaattgaaatatcttactaatttatctttaattatcattaggtaataataagcacaagaacaatatttgcttataatcaactaaaatatatgaatgatcccccaataggaaagaaaatggtatttcaagtctgaattttgttctgtgttctttaggcagccgaaagtgaggtgttagaaaaatgcccttgcatccttaacatgatgtttatttgaaatcatccttacaaggttattagagcttcaatacgttaatcagaactactaacaaacaccaggcaggagtgaagtactcactttgcaatcagaaaaatgtggtgattgggttatataacaaatggtgacatttaatgttttcagcattcacctgctttagttcattttaaactgattgtacctagaatggacacagaaatccttctggttcaggctcaacataagccatcctgagttttcagaaaataataggagcattacaatagtcatcatgcgattcatattccaagtaatttgctttcccatcttgcctagacaccctgcactggtttctattatccttctgtttcaattcgtgctgttcctattatggaagctagtgcacatctaactttttcatttaacatggaccccaacacataaacacatttggcccatccatacaagatggttgaagattctgctcaaggcaaatggaaacccagagagaaactagtcaacttgtcaaaacatatttttcccataatgaagaaattgtctatctaaatagggcttgggttatggagtgaaaaagaactaggatgtcttccattatcaaattgccatattcctattccaagtatacgcttgctgttctctctctctctctctctctctctctctctctctctctcnnnnnnnnnnnnnnnnnnnnnnnnnnnnnnnnnnnnnnnnnnnnnnnnnnnnnnnnnnnnnnnnnntctctctctctgtgtgtgtgtgtgtgtgtgtgtgtgtgtgtgtgtgtgcgtgtgtgtgtgtgtgtgtctctctcccttccacccttccttcctttggtctttgtaaattagcatatttgaatacaaagtaatagagtaagaacagaaggggaggaagaaagataaaaaggagctggggaagtagaataattgatagaacatttgactagtatgcacaaagcctggacttgatatccagaactgcatttaccaggcatagtgaaacattctacattctttcattctagcagttgaggagatggagacaggaagatcaaaaattcaagggtcaattctttgttacttagcgaatttaagacagcttgagctatatgagacgctgtttcaaacaaacaaacaggatagacagacagaagaaagaaagggattgggaaggagaatgactgtgtttttaaatcgttgccttcctggtatatatacaggttgacaataatttttatgactcactaagctaagtggataaaattgtataaggtttctgatgcaaccagctagagggcattggctatctaaagagctaagaggcttgctatctcaacactaagaggatatgctttgggaataggctctaaatctttaattgtagataatttagaaaaaaagaagacaaactacatagtaacaaatataattaaaatgcttgttagttttccttgtgaagatcagaaacacaaacatatatgtatacatacatacatacatacatacatacatacatacatacatacatacgcatatgttttaaaggatgtcagatatagttatttaggtgaaattcacataaagaaactaggatagacatttgaggaaacactgatcaccaacttaataactgcgatactcattttgtgcatgtctcatttgatcttcacaatggagcaatgcactcagagagcttatggtgatgactaagatgagaatctacgttcagattctctattgtaagttcctgttctttcaatcaaagctgtgggtttttttaaaaaatttactccagaagaacaatttcttttcacagtcttataataaaatcccgtttataaaacatgaaaattgagctgggatgtatgaacgaacacatggctaggagaatgaaaatagatgggagtttccaatttcatcaccaacctctcacgtttattgacagaaatccttgggagtcttgaagcatactttgggaaatggctgtattgtattatgaaacttcacaattaatacatacttgtgttaatttctgctaaaaatacagaaaacacaacagtatttctgctctatcacaccatgcctcctattagtgatttgtgtacttaagacaactcattttaaatgccttcaagagaataaggaaatgagcaacccccaaaagagaatgagaaatcaaaatgtaatcagacatatatgtaaagcatgcttatatatacaaggtagagttttgtttctcatcaccatcaatttcttgctttatcatatgtctgaggaaagaaaatgctaaacaaaaagtggagcaattctacttttaatgagtgtctaacacaaacatttcacagcaacagaatgaggcatgcctttcagtgacttagggcatcatttatgttcatacacaatttatcatcttgaaaacaggagcctgaacaaacagctctgatgattactaaatttggacaaactgaatgactcacttaagttttctgttaaatcctctaacacctttttagtccaattctatttcttccctcataaactcaaatgcagaagaaatcatcttccatagtacccaaaacagacaaaatcacagaaggatgaacaatcaactttaactcatggtacacaaatactgtgatgtctattaaaattatgttatcagcactctacttagattggattgtcactcaacacaacatattttcacaatattgtactttgccacaatgaagtcacctcataccttaatacccctaaagaaaatacattgttaaattctttcctttcatttctatggacacacgtattaatcttattcctgccatgtggatgagatgtcgtcatagtgctcccatgtcacttgatcacagaacattaagtcaattcttgaagctaagcattactgatgttctagcatatggaaggcagggagatcctaagttccagaataggatggattacagagtggaacactattataaagaaaaatcatatcaaaccaaacaataaacaaagaagataatcattccaaattgtatgtgataacacagaccctagctgaatatcacctgatttagagtgacaggaagtcataaaagaatataataaagcagggaggaaacaagtttagacaataaaagtggaaagagatgtggaatggtgttttaaaaaaggcattgaaatcacattttcaaaccgtattacctaaaggtagcatagagaccttcatatgggaagctagccacacctatcaatagttattactaggacagttcgattactttgtcttcaatatgaacacatatatgtgtacacacacacacacacacacacacacacacacacacacacacacacacacacacacactcaaacagagtaaagcatacatatgttgttgttcagtgtctgcttgtggccattgctatgcatcaaaagaaacactagcccaaaatgaaagttgaggaaaccaactccaaagctgactacctctaaaagtgcctggtttatagccttgggctcacattatttcatataatatcaactttactaccaattgcttaatgtcagaagcctgacaaatgtttccagattagagtcctttcacctcccacacatctattctattctttcagtaaaattatgcccatttaactttcaaaaatagaaattttagacaatgaactttctactgagtgacagtggctaaatattgagaatttcacatgatttaaactgatacagttgggtaactgagtacatttttgccatttgtactaacactattgtgatatcaagtattattatctctagcctggattattccaatagatttttctgaccttctattattctcacaggggggcctgggaaagcagtacaaaggatttcttttaaattctctaaggtattctttaggaatagaacacatatctaacctttatcttttactttccttttccctttctccccagtaaggtcatggctgcttacacaatgactttcttgttatatagattagaatggccagaggaaaaataagtttaagactttatgctatcctggataataaaaatgtctcctatgttttctcatcccagtgattccacctctcaagaactcaacctcatctgtcacaaagggatacgacatctactactttgcacaagtgttattgaatgcttccatttatgaaagtgggtgggaactgagcgccatgtgagaacatcactttcttcagtgacattagaagaaagttgctgtgaaacgcatggcaactataaccagattcagaaaaattattttttaagatgaggtttctaaaatattttctataggagtgctaaaaatgatgcagggtgggggtcattggggaacaaatgcaggactcatgttatactaggcaaaggccctacaactaaaatgtcctcatctctaaaataagccattttttaatttgtaaccaaagctcctttaggttctgctatgaaaaagttgctgttcattaatgtagcatctagagatactaatctagaaaatatttcatttaagcattgagagtgcatcaatgacaactaattatgaaaaaggtaagccacggataaaagaaaaccattcaatgaccttttgattatataaacttggtaagacatgaggcttctgggctgaatagaaatgaatagaaaatggaatacagaggcaaagtgaagtggtggcatttgaggattagaacagccttgtgactttcattatcagaaactgtaaaagcacagcataggaggatttatcatctgtgaaggagtcaagagcctaaaagtaggctaaacagcaatgaaatattatgtcatttaacctagtgagccatcttgatggccatgattcttttgtaatatcaaaaaattactgaaaagtagatgacattgtggctacatttggatctgtgcttcaacctacctaagctacacatattactatagtcaggttcccaaaaagtaggcagaaaaatactagagactcggggtgtaactcatttgtagagcacttggctagcacaaggttgtgagttccacaaacaaagccaaaaggaaagcaaacaaaactcaggagaaataatctgcctctaaaggagatgtagtcgtgctgcccaagggatctacagtaacactttttgccagctaatgataagggctaaggaaatgaacacaaggagtacttgaaatatgttctagtccagtggttcacaacctgtgggtcctgacccctttggggatcaaacaaccttttcacaggggtagagtatcatatatcctgcttatcagatatttacattttggttcataacagtagcaaaattacagttatgaagcagcaacaaaaaatagttttatgattgggggtcaccacaacatgagaaactatattaaagggttgtagcattaggaagattgagaactactgttatagtcatactgaatctaaaacctgtaaaagcttagtaaatataaaaatattcaaatggactgcagagtcaactcaaacaaagtgtatcacttgtacatcacatttaaccatcttcttttttcattcaaaatttaattatagctacaataatataattagttataccatccttcaaaaaacttaaaataaaacacaaaatttgagaggaaaattctgggttgataatttcattcccctaaacaattagaaaactaatattgctatcttgcaactttactttactttggagtttgtgtgaccttgttggaggaagtgtgtcattggagtgggctttgaggtttcaaatgctcaaagctaggcccagtgtctctttctctctccctgatgcctgctgatctggatacagaactctcagctactctgtaacatcacgtctgcctacctgtcaccatgtttcccaccatgctgactatggactaaacttttggaccatcagtcagccacaattaaatatttatctttgtaagagttgttatggccatgttgcctcttcacagcagtagaaatcctaactaagataccacctgatcatgcttgatcatgctatcttgtaacagaaaaggtttccctttatgatatagggagggatattttaaaggaaaggattggtttgccacatgagacaaaaggattaaacttgaaaggccccttagatactccaagttcttccacaaatgcttattctctcctccccactccggctctctccatccatccctcccctctccctctctacagataaggaagaaatagatggtgagtgatagacagagagacagcagaaattagtacatcttcctttggccttcatagttgtttcaagggtcagacctagtgttggatagggaaacaaggtctagatgttacagagacagggcagatgccctcctataataagctgtcaccatatttggaaacttcagacatacttatgaaaatattccttttcacacacagacttatcattagccactcaagaacaaatcccacagtgtgcatacattttactgaatggaacgtttacaaactaggcatactgtatctacgaggccaattcaccagtattcagtgaagcataactatttctgtattatgggaataaaaccttagtatcacatgacaagatcatcttggtaattagacagtggctttctcaagtcaacttactgactgtgtggtcctatcctcaagccttatttatttacctaacaagaatgaattttttagacacttgagaccctgagagacctggtctcaatggaaaaatcctgaatttatcttgtactactccattcacaatttattacctaccccaaatccaattaaatgtaacaactcactgctccttagctttccgatttccctgcttctcatcctcttaaatgtctctttggtgcagaaagtctttcttatctccatccttacttcagatacaaagctgaaagccagttcctttgagatagaggataaagttccaaagaaagtgtttatctatagcttccataaggctaaggtggataaatattaaaaaaagactctgggggaagtggatttcaggctgtggttctccagaaacaaggtagaatcacagcaaccaaaggaaaaggaaagtagaacgtgtatgcatgtggaggaggagagaggcagtgaatagattactgggaaacagagaaggaacatgattgcaggagggctgctactgccttcacactctctgaatcacagaacgtccattgttcatcaacattctatccaataaacatgtgtacacttggtgggatttcttcctgaatggggtaagcagtctttctgtgaaaatgaacagcagcatgagaagacttgaagctgccaaatgaggtgacagcatatagtggtgattataaggcatatgtctacaatcctgtatctcactctctcagccaatgccacctttgaccacggaagcaacataggaaccaaaggaagtatgctaaattctcctgtttgcacttctgccatgccatgcctgcccgcctgcctgcctgcctgcctggcttccttcttccttccttccttccttccttccttccttccttccttccttcctnnnnnnnnnnnnnnnnnnnnctctctctctctctctctctctctctctctctctctctctctctctctctccctcccttcttctgagagagaagaaggagagagacagagagggagagagggagggaaggaatgagggagggaggagctgggggaagatagagaattgttgagtaagatgcatctattgagtaaaagtaaatatagtgaggagacgaggagatgagtttagagtttgctgacatcttatgacacgcaattatatatgcctacaatgatactatgccagaatatcttacagtagttgcaacaggattactcccagacccaatgccctattgtcttcatcctttctagtcaatggtgttccacttattttgcagacatttatttttctctggccgaacacaaatgtaaaaacgacaacaaaccgcttaggcatggggttgttgaaagcagctccaggagagaagaaatatcatttatcacaaatagcaaaactgtgcttgtgacagtcccttgccttgttgcctttccatttttgccagagttttcagcataggatctctcagcacctgcccttggctatggcatgggaggatttgaaatttcagtttgcatggtagtggatgtctaatgattttagattgtcttttcccaggagttttggacaaattgtgaattagatcactgttggaccatggtcacaacaatgatgcatggtgaacagtgccttgaggaactgtgagagagatgccaggaaaaacggtatagggccttttacctcaggtgcattttgttccctggattgttcttggtcatgatttcatgcgcctgtgacaaacatttacactcaatttgtaagacatgctgattcctgttggatgtcagaacatagctatggaaaccaatctggtgaaaggatatgctgagtgttgtcctcagtgtaccctgaatctggatatggccttctgcctgcttttgtgttttcccagatagaatctatatagtacgtgccaggcaattgtgtatcaattgctctgtcctgagtaagttctggcaaagggaaactctgttattatttagaatgtgtttactaaccttaatttacatgcgtttctgaaatcaaacaacttttatttgattattgctttctttctttttatctttttttttgggggggaggttcgagacagggtttctctgcggctttggaggctgtcctagaactagctcttgtaaatgaggatggtctcgaactcacagagatcctctgcctcctaagtactttcttttttcatttgtgtataaaagtgcacagaaactgaagtaaggttgtctacagcattagactggagtctgccccattctttcaggtcctcagatcccaggtctcccagacactgatctgcagagtttggtttaaaagttgacaaaatgtgctatgtacaacaaaagtagaagctataagaggatgtgaggatccctgaagaaggagttgagcagggattaatatggggctaaaagtaggaaaaccagtaccatcccaaccgtactttccacatgctcattctcactgctgtgcagtcctctatttgttctctctggatgtatgtagtgtattacctacatttctatttctccttgacattgtacactgccttatgaattccaaatatatacaattatcagtcctttcttatactgaaacaacaaaacatactaattgatacattaaacataatcctaccctgttgatagcaaaacacatactttacaatgtagcaatgactataccagcatacagaatgcaatttctgaaaagatagcttcatgtcagtgtttatatgcaacagcctcctttattaaaaaggaaacagctataataaacacaaatcagannnnnnnnnnnnnnnnnnnnnnnnnnnnnnnnnnnnnnnnnngggattgacatgtaaagcaggaatcaaacatcatgagatgaacaccatcatggggatgtgtacaagagcttttcccatatgggattctctgctacttcattttgaaactgcataagtaggacaactgtttctagcaatatatctatccaggccatttccaatgttatttccttctcagtaatggttcaaggaggattttacatgttgtaacatgaagtttttttcatgatcacagcttcatgcagtcacaccttaagagtgttactgtaattgttcaagctcagccagctattttcacattacgtgattatgctattacatactttttgaatatgttatgtaacttctaagacagaataatgtttacaaactgacagtgtttagacagtatttatgatccattgttgtaactagatcacaggatctgaaagccatatgctatttactcatcaactttaactaacttggcaaaacactgatgcagaaattcatactatttccaaatccttagtataaagcggaacatcatttttatttatgtagtagttaaaatcattctgttctttcttctacttctaaagcaatcctgtttagtttttatttcccatgaatatttcaataagaatttcctataagcaagacactctgttaataagggctatatgcatcttgcaaatggcattttcctttttttttttttgtctagcattcgtttcactcacacaatcaacagataaaaagaagcagcttgaagccaggcatggtggcacgaacgtgtaattctggtactcagaaggcagatgcagaaagatctctgcaagtttgagaccagcatgagctacagaaagagcactatggcagctagggggacataaacaagagtttatctctaaaaaaaaaaaaaaaaaagctttgattacctttttgaaaactacatgctatacatgagaggttactaaacacaccacaaatgtacacacacaggggtggggattggtgaaagacatggtaaataattaactattttagaacattgttttataacccagctgctcttagagacttacaataaaataacatgttaaaagtcactagatagtctgcaataaatagaacattgtgtctgtgtttaacctggtatatccacaatttatttgttgtaagtattccacagaccattgccacattttatcttttctttttcaaagctattttaacatcttctggaacaataatgtatagagtacagtttaagagaaaacaccaaacctaataaataaataatatctcccatatatgatctaacataattttaacatcataaacatcaaggtattgtaaccctttccttgagaatgcaaatatatcaagactgttatgaaacattttctgaatagcacaatactaataaatagtatatatccaaagtctgatatacaaaattatagttgcttgtctccttttagtagcaaaaccagatcatctactattgcagtgtttagatgcagctggaaaagtagacacaattaagaaagggaccatgatccactagatgctagtctaaagtactttttgtgaaattatctgcatcaatgcatgtaaaatgcaagccacagatatggatatacttatctgaacaccatgagagtatcaaatacagtcacgagttaagcaaaggccattcatacaatgacttaaattttcacatctgtcacattattaataaatatggaacttgaacttttataaaaagttaatttattacctgttactaatagaatgattcattttgcacatgatagagtaaaagaattaggtcccaataagactgtgaagttccgctggcttattctctatctaaaatacatgtcacataattatgatatatatccatcccactgcccatagtgttcattctttgcaaattatttaggctttagttcaatggtgaaaattctaacgattttttaatcattattcctgaaataggatcagagagatgcattttctagaacatataggataaagcatcttctttcattttcttatacactccttacttgacagctccttatctttggaaatgcaaatgacaactgatgtgaataacagcattcttagtactgtggatttggatgtgatcacttgccaactagaaaaggaatcaagagatcattcaaacctttcaaattggtcattgccaatcacaatctggtatcagagttgaaagagtagttctcgatgaatacatatattattctgtagtttcttcactatgtacacttctaagaagttataacaccatatgcattacctaggcaattacagactcgaggaaggcccatatacaatttgttatctgaattagtaaatggaaagtttataagatttcaggtgccagaaagtcaaaaacaaacttacatgcaaattcttcagaatacagatctacaagcatgacaccaactggcaatctaagcaaaagtggagaggctaccctaaatgcccttcccttataatgagactgatgactaccttatatgccatcctagagccttcatcaagcagtgactggtggaagcagaggcagacacccacagttaaacactgaactgaactggaatccagttgcagagagggaggagtcatgagcaaagagatcaagagagggctggtgaaacccacagagacagctgacctaaacaaaggggagcgcatggaccccagactgatgtctgggaggccagcataggactgttccagatcccctgaatgtggatgtcagtgaggaggcctaggcaaactatgtggcctctggtagtagatcagtatttatccatggtgtaagaaaggactttgacagcccattacacatggagggatgctctctcaacctggacacatgggggagggcctaagccatgtccagatttatatgacagactttggggatcccccatggtggtccttacccaccctggggagcagagggggcatggggtggggggtgaaggaggaggagagggattgacatgtaaagcaggcttgtttctaatttgaactaataaaaataatttcttggataaatatgatattctttaaatggaacagaattctaaattgcctatttgacattaattcaatgtatccttcagtcttacagcacataaatggaaacagaattttttgaggcaggatttctttgtgtaaccctggctgtcctggaactcactctatagaccaggctggcctcaaactcagagatccaccaacctctgcctcctgagtgcggggattaaaggtgtgtgccacaaccaccactgtgataaaaaacacagttcatgttacatcatttgtgtctaaaatcttgttagcaagcctcagcatagtttttgatctttcattataaaagaaaagatgcaataaacaaatcttaaacagtatttgaacaaaaagaaaattgccatggccttttaaagtggggtacaatttagcattgatatttcatatgaaataaattacctattgatggtacttattatgtatctttgaccaaagggtcttaatttaaatttgattatgatgagcacaaccacaataccatccacagaaagaaaacctactggtcaagctttcttaaagcatgttttctagggttggactcatacaaaataagatttaaacatgtaagctagaacataggaccctctgtcctttccttgtagtactgttcttttctttttctgtttgtttctagtattacgtatggaccctagagtctcacacataccagctaagtactctaccactctttacccatttcccatttattttgagacaaagtttcatcaaatggcccaggcttccccaaaacaatatctccatcttcttaccaactcttttttttttttttggatttttgagacagggtttctctgtgtagctttggagcctctcctagcacccactctggagaccaggctggcctcgaattcacagaaatccacctgcctctgcctcccgagtgctgggattaaaggtgtgcgccaccaacgcccagccaactgcctaactctttttaatctgttctacaaatgcactccaaaatgaaacatcttaactatatgtcttgagggtcatcctcactgagatcctttattatatgtgagtctaacttgtattttcaagcacatgcctccttcccggaaagtacaagaacatagacagaactcattttagcaattttactattattattaatggtgaatcaagaacctcagcctaccctaatgaaggccttattgataacaatgaccgctatttacagagtaccacataccacataaaatacagggtatttatattttaccttagttggaatgtctagcttacattatttttctatttatatataatttcttctttcttgagctagaatgtatttttaagtttattgcaattaattaagtcccacttatttctgattctgactcaaagatacagaaaacagttcctgggaagtaggccagcaaaaaacatccttccaaattagtggtatagggacaaacccacacagggagaacacatgtaacagtatctttatagtaaatacgaaaaaatagcctaaaacctgtattttgacaaaataaatccttctgcnnnnnnnnnnnnnnnnnnnnnnnnnnnnnatgacaaatttttagaattgagagtattcaagtaagatataaaaacatgacttctcaaatatcttcattttcttttcacaccaagattttaagttgggttacataggtatattgtattaatcacgtggtagattcatttcaatattaaaaatcaaattataataagattccctagactattccttgttattactaagtagagatagcattgataatgtcagatatatccaattcaaatgtttgtcttgagaaatttcaaaaaacccacaaattattataaatcattcactatttatttcaactaaaagattttccttaagtttggaagcattaaagatgattaggaatcaggaataggtcttaattttcagcaaaaaacctacatcaaatcccatcattatagtaatactcatcttggtaacttatttacccaaatcactgtaactgtagcatttcccccatattctctacttcggtacaatacataaaaagaaaaaaaggagtgaactacaaatcaacactgaaataaactggcagtactgtttggggaattggatacttttactcactaactcagtttgactgccagtggtattttgataaataaaaatctacagaaaaattgacaaatgcatattaccagcagatggtcagaaaccttgttctatataaatctacagtgtatataagaaagaaagtatgttagggtaacatgcctgatttcaatatcttctgatgtttttatattgttttcatcctgaaaatggagcaagttcatgctcaagaatttatataagctgttaagtgaaggtcactatttttatttttaaaaaaatcatttcccaataggccttcttaccactctgttttctcttattatttgttgcttgtggaatttctgtatgtcagaattggttagctcatggtgctaatgaggccaaggtcatgagtctgattctcatatgggccatttagttttatacaaagaaaaagaaatatgttctatatcttttaaaacaaggaactgcaactgcagccaacaaggatacaaatttatgtccttggcaagaataaaaaccacaaaaaggggctctggaaaaaacacctaaaaacacttgtcttgataacagctaattcttacttgagaagattcttcttcgtgttcagaacgagagtactgtttctaacgagttcacacaacaaattgggagagtaaagtggaaaatcacaatcatgcaaattatacattaaatattttcagaatccattaataacacgtgcttacatgtgaaagaattgtaatgcttccagagggaaaagaagtaatacatacacatggtggcaattacatgttccaattatacatgcacacaggataatgcataatatggataattataaaatcctacacataaggaaaagcacaaagttaacaattttagggatagcttaatcattgtgtgagaaccaaagtttttcagcatgtaattaggtttgcttagagcacaggctaactgagtgttaatagggaaattcctatgtaggcttaatgagcttttggagcttctccgtttttactttgattttcctttttttttttttttattttggtgtaggggaatcccaatgaactacgctgagatttatcttaggacagtataaaaatagactattgagaagaagagtctggagaatctgcttagatgaagactgttgaaaagtaaagcgagtttggcatgatagtacaaacacttactttaagcagttcacactcaagatgcagaggtaggaggttctccatgagtttgtggccaggctggtttacattgtgagttccaggacagccaggattacatagaaagattcccaactaaaaaataagaaagagagcttacatagaaataagcattgacaatatggatgccaatctattatagaaatagggattatagcatcactcatcgaataattgcatgatgagattaagagtcttaattataaagcaagacaatgtggacatgaaaccttgttctttcatttaatgtcttttagttttagacagctatctaatttccttgtatacctgcagatccaaatggaaaatggagatcaaaataactcaattagtaggatggttttgagaatgaaagcctcagtactgcacaaatagtgaagatgttatcaatatataatagttgttgttgttgaatatgacaatacaaagaagtcccaaacaatccccagtgagagaaactacacaactgagaagagcagtgttaacattcaaagaactaggttttagaagaagaccaatgattttagtgcttttaaaacactaagtttagggaactggaaatacattggtgtgtgtgtgtgtgtgtgtgtgtgtgtgtgtgtgtgtgtgaacaagacagctaatggtttaagagtgaagaaaacagggagatataaacatgggagtcctctgggtctaaagattgattgaagctatgagactggtgaagacagccaagggaaataaggaaagaaggaaatttcagaagtacatgaagtgattcatatccaaaggcaacagaaatgacattaatggaataaataaattctaacttcatgtacttggaattccataaacatcagttgaaaatttgctaaattatcaaagctactctctattttacaattaaactgtatggtcgacatatttttgagaaaacattgtagtgataataatgaataacaaatagtttcaaggttcaatagagaatgatatatcttaattgttatgttaggtactatcgatttttttcatgtggttgcttgacatttccgtaattgtctatgggaaataagtaaaaaaaaacctagtctgtttcctataactaatatgcacaatataacttaaacaactcaaagaaaatgcaatttctaagaatgctttacaaagttctgtagaaacaatctccaataaaataaatacattagaaaatgttattcactgtagatgttacttcttcctgggtctcactttttttcatacataaattaagatatatatgctacactatttctgaattattttcaggacatcataaataatctaatgtgttctctttataaaaatcttgcttagtctatcaatagtaaagaaaacaaaagaaaagcaagccataataaaaatatgggtaaaaatcagagcttgtctgtgacttaagaggtgaagtccagtattgacattgaggagtggcatggacaaacataaattgcaaacaggatacaaaaggagggaatcacctaggtaaagggtggctggtgggctgtagattggatctagttaatttatttagtgaaataacttccttcaatctgtttatatataatctcctctgtaccaagcagcttgtattctacaagtctcatttgttacaattttaacttatatagtttttagcatagtattatcataagaagggtaaggtagctttgaaattcaaataacatttcctgcagtagccactctgaactgtaatcaccatttgtgcaaataacaaatgatctcggaaagacaagagaataaagaaaatgtgaaaccaagactatgaacagaatgttgttttcccctagagtataattaagtctaattgcttaaattacaataagaaaataaacacctaaatcaacccaaacatagtgattctataaaaataatcaaatatttatacaagaaagatttcccaaatttagttactataactaatatgaaagagtaaatgtttaaatatctaaagctctagtcttgttaggagtaacaattagaaaagcgaacacaatagagaattaaacaaaaattattagaaccacacaagaaagaatgtagaaatataagatatgttgagttaataccagggtcatatctccacatttagagttggcattatataatgtctaagactacacttggcctcagtccttcgtaggttcatacatctttttaaactttttgtttccatccaatcttctctttcatttaattagagaactctcgtctggcctgtcagctgctttttacttcttaagctcgaatgggtatgcctgggatactactgctcagccatttaaagaataatttttgcatacatttctaaatgactaatttattaagtatccatatagtatctccaaatgtatttaaagtataaaattttaacatgcaaaataagtataatgctaatatagaataaccagtgtagccattgtcttacatgagaggaattggaaaagctaattttctttttctttttatctatttactgctttggctttaaatcacataatttaatcaatagtcaactccattctattttacatccccccccaggagaaaaaactgacacatactcaatttagaaaaaaaagactggcgagttcttcctctgatttcaattttctttgtagcaaaaaggcaaatgagagatttatgtaacagattttttagaggttggccagaagaaaatagtcatcacttcacataagaagtttcttgcatagacttcttggtggtgtctttgggtggtgttgagaccagaaaagacaatgacttcagctacaatctagtgacatctcttgaaacgttgcacacactgctgattttaaagcttcttctagagaaagaaggagtgggtggattcgaggagaaatgggaggttgatgggagagacttcgaagagaggagggaagaaggaatcggaaactgatcaggctgggaaaaattaattaacaaaaattgcttctctaagtagctgttaatgattaacctagaactattagtagagtagaggcataccttttgaaaggttgattcagtcctgttcttataattaattgtgtaacttctggcaaatcacttaactgtttcccttcctataaaccaaggatcataatatatactgtgcttgctcatggagatctttaagagttgggccattagaagctgtgtcaattacaatcattactactaccattgcaacagttaaaattacagaaataaattggggaacttttgcttggggaaagttcatctcttctgctctcagcattccaaaacttcatgttatagcactaccatttgtttcttcattgttctggtcttatttaggcagccacactgatgactatacacatagaggtaacattatatggaatgggaaggttgtatttaagaacatatatgtgaacactcctccattgctagttggaatgcaaacttgtagatcctctttggaaatcagtatggtgattcctcaggaaaatgggaatcagtctaccacaagatgcagcaattccactcttaggcatagacccaaaagaagcacattcctacaacaaggacatctgttcaactatgttcatagcagcattatttgtaatagccagaacctggaagcaacctagatgcccctcaactgaagaatggatagagaaaatgtggtacatttacacaatggagtactactcagcgggggggggcaatgaaatatagaaattcctgggtaaatgtttggaactagaagaaaccattctgagcaaggtaaccaagtcacaaaaagacaaacagggtatgtgctcactcatatatagattttatacttacagcaaaggattaccagcctataatccacaccaccagagaagctaggcaacaaggactctaaaagagacatacatggtccccggggaaaggggaaagggacaagatctcctgagcaaattggcagcatggtggggaggggagagggagctaggagaatgagaaggggataagggggggtgaggaagacataagggaacaggaaggttgtgtagggggaagtatagaggagagcaaaataagagataccatcaaagaggaagccagtataggtttaaagcgaaatcaggcactagggaaatgtctggagatctacaaggatgacaccaactaaccatctaagcaacagtggagaggctaccttaaatgccctcccctgataacaagattgacgagtaatttatataccatcctagagccttcatccagcagctggtggaagtagaagcagatacccatagctaaacactgaactgaactggaacccagttgcaaagaaggagaagtgatgagcaaaggggtcaagatcaggctggtgaaacccacagaaacagctgacctgaacaagagggagctcttggcccccagacgggtcactgggaaaccagaatggaactgatccagaccccatgaatgtgggtgtcagtgaggaggcctcggaaatctatagggcctcctgtagtagatcagtacttattgctagcataggaatggactttgggatcccatttcacatagaggtattctccctcagcctagaaacatgcgtgagggcctaggccctatcccaaagcatatgacagtctctgaagaatctccatggaagacctcactttccctgggggacagaaagggtattgcataggtagggtgttagtggggggcaggggagaagggaaggaggaggggaactgggactgacatgtaaaataatcttgtttctaatttaataaaaaaggagaaaaatttatgatgataagccatgaatgtgttatgtttttgtcattatcatctatctatctatgtctgtctgtctgtctgtctgtctgtctgtctgtctgtctgtctatctatctatctatctatctatctatctatctatctatctatatcttccaagcaaagaaatatttgagggtttgagtacattatcagaatatagttttcattgcttccacctcccattaagtagtcttctgcgaggcagtggtcaaaggttagtaactactactatggttctctgaactccaaccttcagatttaaccggtcttcgatggtacctatgtatcagtatgttttaaaagttcctaaggtgatgttaacctgattctaggattgagttacaagaacttgtaagagcaataagttaaatgagatgtagctactcaaggtgttaagttataaataaggcaactaatgaccagagagaactgctggggaagcctattaaatggacattgtaaatgaagagataaagagcctactgttaaggcaaaccaaatagaaaagattacaggcattataatatatattatatttgtaaataattttgaacattcctgataaggctaagaaatgttcatatatattgaacgtcaagcattatgaaactagcatttgaacacagtatactataggatatgttacataaataaagatttgtttttatatgagtttaacagaaagattttatttcctttctggctgttcagatttccattttaacaagccaatacttgtctggtagagtccacaattcttcgcacatttgcctgtgagatatccataagtatagtggcaccctaaaaagattggctatctctgaatgtatctatgaagaagcttgcaataaagtacatgagttaataatgaagattaaagaataaagtcgctgcaagagaagtgttattcacactaaactttgaaatgggagacctgcacaaatgacatgttaagtgcatggcttgctaagtaattaagaatacccatagtttggagctatgtgataaactagacaaacttctttactatacaagtctcattttagaaagcactcacaggtattcattatattctctggttctgtgcatagtcaatatcttacattataaacaaatgaaaataatttatataatgattggttattgtgaagattatagatataccagagattcaattcctggggaacgttaaatattagttatcctttcctatactatattctgtttcctctttgttttcacctttttccttatacacatgctgttcaatgacaacaacatgccactattataggactgatgaagattatagacattccaaacatgctccagtattgcaatttagacacatggctcacagactaatttcacagataatcctacttaaaatcactctgcatgacttaaacaggcctgtcttttgctctggcactttgtcattatgtggatgacaaacaaatgtttatccctcctttgaaattttaagctctaaatcccactctatagtagtatgacctggtgtccatatttctgtcctatccaaaaggaacatctgagagggtgtggctattctacctaggaatctctgagtaggacaagcagaaagtgaaaaaccaagtgaggacattattacaagggagctttggggaatgggggagctctcaaaatggaggctggaagagagcactagatcccctggaagtagagaccattgtgagctgtcatgtgggttccaggaatcagacctggaggacaacatatactcttaactgctgagccatctcaccagacctgtagttttcattttaaatattcgagtgcagcatgctagaggttagcattctggtgtctacactgagattgtgtttacaaatggaaaacatattgtggtgtaatatagtcaccatacattggaaaggccatagtggttattaaaataccttcaagtgaggttaggaaaaattcactgttgtagaaagaaatgtcaaaatttgtcaactgggaccaggccttcatttcaacataaatgtatgaaaatgggaatagagttataatatgttcctgtctcggaagcaatttgtctttgaacagacactcattaactacctgaaaaagtgtaaggggtttgcatttcagatgtaactcagtcagattactagctccaaaagtatacattacctatgtgagtttgggaacttactgaattattataaactactgtttcaaaagtgtaagaaccatatctgtctcatagactaatattgtcatcattcaggtagaggctattcataagtagtttcatttgtattaggaattataaacaaatacttccttgtcaggaattagataggcacagaaatagatattagagagatacacacgtgtgccatttctgagtttgagaccaactgtttatgtgaccacaagcaaattgtgtaactgggtgaggaataatatactgggtcaggaaaatatttgtaaatctcagtatataaataacttccattttaagccaaagtctgacattcatttttgttatgacattctagaatctcaacagttaatagctttccagaaatataatgaaacattaaaacatgatagcacatgaaatctgctatgttcatcatgatcaacgcataaaatttgttctgtattacagaaaagactattattgataagatagaaaacacacacacacacacacacacacacacacacacacacaccagccaaaattattaacatcagttgatttggagaacttctaataccatattcaaaggattccttacctcacttgacatcacaccatgatgcctctggctgaaactgctaaaaaatcaaaaacataaagtacaactttcaagaggaaaataacaggaaagaattagggatgcattcgataaagaatatacttttcttaattcaattggcctgttatttagatatattttttcaaaactgcactgaaagtggtcactgggaattacactttagcacttctgggtgtgattcacttgcagttctaaaggcacaggcacattaagacaaaatacaggtgccttctgttacataaaaactcaggagacttctagtttattgttgaactctgagggtataatttgacaaattagttttcccattccctaagctttacaactgagttcttaatcagtaaataaaattttcataccccatcattttgttcgctttcttaaaagcaacatcccgatgtgggttttaaatcaagacactttccctttcttcagagttaacagtagaaaagaacagcttctttagctagtctacacgactgtttggcatagttaatattaatgcaacatttaccttttgtgaatttatagattatgggaaagagctgtgcattatacctttctcccacagaatataataaactctaatgcaaatatcaatattctgatttgagctttacattaactattcttatatatcttctcacagagtccaccatttctaactaacagagaagacttcaagacaaatgcgtgaatttccgtaagtttgaagaaatccttgaaaaaggggaccagggagatcttctcaataatgaatggctataatcagagcaaatactaattgtattaagatattaaaatcaaattctaaaggagaacttgttctggatggattatgccattccaaaaatgtatttataaatgaaagcatatcagtttttgagaaatactttatctaaatgtttgtcccatttgtatctcaaaaacactattaaatataaaacaaacccaaggaggcataaggtgattatctctcagaattgggtttaaggaaatatatcatcaaagagagaatagaaaacattacagtttaggaagaacttatacaaagtcaaagcacatttttgtattatactttactttttctactattgaaagcacacctgcaaaatagtctttactcagcttagattagtggtcgctgaaagctatacaaagagatctggtggttttaattttattcatcatgtctctagctcagggacctggggaaatacagagaagtgtgctgcatatttataaggcctctgggacctttacaggcttccaaatgccttgtttgttgcaatctgcttgtcaaactattaaagaagtaaaatccacactctatcccctattgcatatgcagattttctctgttaattaaatcaaacctatatgattgcaaggagaactttggaaatccagtgtcttcccagcttctctaggagctagaagaaatacaatatttctagcaccatttacttagaaaaaaatgactatcgtgttaaaaaaatgtgttaaccttgattgattactcaaactgttcatttaaaacttcagatttagaaggtctgctattaaaaatgatttcatgtcattccttaattatagctactgtaatataattctaatttgatatggacttactcacctctcagatctaagaggttaaacactaaaaagcactaagagcttctttttaaaaaagtgatatttaagttaaaatattattacagtagtctatacttagttaagcatcagtttaagaaaagttatctatatatttgtgcctatgtgtttttgaacacaattataatgtaggcaaatactagtaaccacagaaactgcatccaagtcaaagggaaggctgacttgctgacctttcttcttgctggagacttaagccccagatgatttctttgtagtaagtctgtcacctgactagaaatagtggtgctagcttgagaagcatattcttctacttactctcagtagacccattcttcacatgctgtactggacagaaagaaagagtcactatccttttggatctggtatactatgtgagaataaccccatcagtggtaagaataaaaagtcataaacattagtcttcagaacatcagataattgtgtattttagaaataaggctgggtggatatttactatgaagtcaaagctcaaataaataagaaaatgtagttcatctcacttcggctttcatattacataatcaaaaatgacataagaaaagcaaaaataaagccacacagtgtgaaaaattagggaataaaaagtagtctaacagaagaaactaaaattcttgtgcaagtaatgtcaagactttgttccacgatctcatttagaccagttcatttctgctttatttccctttttcttttgtaacaacatggaatgagctcagaaaatcacaattcagagttcagagacactatagaaaccatcttgcacctcccttcatttcataaagggaaggatcaaagtcaagagagaactgtgtcacccagtaaaccccagagcatagacagaaacttcagatgcctaaaagcttgtcttgtgttcttaaaaactcagttgatttgcccagcaatccagtgccaagactaattactaaccataggggaagtgacaccatagtgatacattgcaaattggtgccagggaccaagccaattcaggaacatgtcctgaaaggtttgttttgtttttatttcattgaatggtaattcctagtcatatgaacaattgattattattcattaataaaaaagcaataagcaacatgcaacatgcaacagccttgttagaacctagctttgtggagtcagggccaggtagttttcagcccctatatcacaaagcttgaagcagtgtaggcctggaggaaccctgaactcagttgtgcagtgagtatgctgtgagatgacatgagactcttgaagaagatgcccactgtcctttgtattcaccccaaatgtggagctgttgtctgacagttaggtacacaagcttaaaagtgaattggaatgacaggagttgggcttctaacagttaggattgataagaagtgacctgagcatggagttgcatgaatataatctctggaacactgatacagtgaagatctctttactaaaaccttgagggcagccaggctctgacataagcccttgtaattggttattgagaaggatgaggcaggaggccaagcctgaacaatgtagtaaaaccaacaggggatgggcctgctagcaatgtactcagtagagtactattccagcacatgtggtgcctgtgattggaacactagtaaagggtgggttaaccaataaagcttttattatatctgaaaaaaagcaagtaaaagaattcttagcgtttgaaccactaagggctgtcacttagccaaaaggatatttcaagtcagatatctgaagatactacagagaattttgaatgctctcaacattaataaagttatgggaaagaaaagaaataagccatttatcatcaaaaggatgtggggaatagttattgacaagtgtcttagttttggcagaggggaccagacataccccagacttatcagaaagcatgccagttggagggtttgcctggatcaggctggcatatgagcatgtgagtgaggcattttcttgattagtaactgatgtaggagggtccagcccattttagccagtaccatccctaagcaggggtccctgcgtagtataaaaaagctagggaagcagagggtaggaggcaaggcagtaagcagcatcccttgtggtttctacttcaagctcctgttttggcttcccttaactgatggaatgcaatctgaaataaaccctttcttctccaagttggttttgatctgtatttcatcatcatcacagcaaacagagagaaaatgaggagaaatgaattggagaaagttccatactgtatgatttcaactatatggccttctgtaaaaggcaaatctatgggcacagtaaaatgatcagtagtggggctgagttgtaaagaatatatctagcatgtccaggattctgggtttgctcatcaaactcggaaagcacctccaaataaaataaaaggtcacagctgctaaggactgcagggaccacaacagcaatctattgaatgtacaagacaagaagtgcactgtaatgtaaactacagactttagttattaatacgatgtttgcaagtctattgaaaaaaaagagcaaaccaacctaatgcaaggtataccataaactcgtttcttctaatgatattaattctatttgccaatttttattgtctttcgtgcaagtttcatatagcattgacattgaaatggaaacagtatttagaagccctgagaagagaacagagctacacagaactcggagcactctccagttcaacttcacttttacagatgcagaatcagaactagaggaacaaatggattttcaaacgattgcccatctaggtttttgtgaggtcagaatacaccaagcgattctttaatggcagcattttttcctggaaaattaaaaattataacacacacacacactacccgaacacgaatattaactcaatgaaatgatcccatacaatcaaagactgtaatttacgtacttgtttctcagagcaatagaccaattagtccataataaatgcctccaaacctatatcacatatgcagaaatataccatctattatactattattggacatgtcttagaagtaccagggctcaaatacagctctaccattaaatagatattagaccttgggaattgtggtaaatgcttctgagcataggaaatcagagaatgcatttactaggaatggctactagcttgtattcaatataagttacattcttcataaatctgtcatttggatgacataattagtcattttcttcctaagttgcacaaatctgaaatactatatgaagaaatatattcagaacccaactcataaaaaagccattctatcatgaaactatacaatgattgacaagatagttatttccttcttttccataaacctacaaatgcaaggaacatatgttggtggagtaggggatgacaagtaagtcagttcacgttacagtatcattttgtattatttctggtctctttgaattattttcctgtcttcagtgatattttctacacccattaatttattacccatgaacttaattaaagtgttgtttactgatactccttacagatcattaatagaatgttaattaattatagcctagtactgtcagaatctcctacataatgaaggaacctctcccatcccattatatcttaggttgtattgtgaaatcacttcaatcaagttcttgcctaatacaataccaatttatttttaaacaacttaaaacttatgaaatataaatatttcctatcagtgctaattatcaggaaattaataaatgcatgatgctaagattttaccaaatgagagagtagaaagaataaccatctattcacaaatagacagaggaagtttttgaacataggcaggatattttatcagttattcatacacaatgaaaatacataagtatttcagacataaaatgttatgtaaatatctagatatagatatagatacatacacacagaaatatctcacgcatacaaagcaatgtctacgaaatgataacatttcagggttaaaatctgctctgaacttgcctgtgtgactttgtgatgcttcatacaaaagccacttgaatggttagggtacagattcagtagttttactgcattttcaactaggataacaatgtcagtcagaataattggcaccataggagcaccccatggtgataacctaaaaaatgcctctactgggctcatgtggtggcagacagtttctcagatgataacagcaagtcttttaaatagagttggggactgatcaatactataaagacatatacttctggctgatgtattaccttgctgtctttcaaatacttcattcagatatttctggggaaatcactagttctctattttttaacctggcaaacaaaactttaaagaaattttgcacacagaatagaacagtctttcttattgaattgaattcatgggggtatcacatgaacaatgacatgaagcacaccattaacgaatattatgctgtagtctttcaatcacttatccacttgctcaatcattcattcattcaaaaatttccatcgctctttaggttgtaaaaggactagggctaggcactgtgagaaatacaagggtcattagcagtctctgcacatggatttgcaatcctgtgctgcacctagcaagctggtgtttatttaaaacgtgacttaagtaagtacaggcaacagatctacccatcaatttgtatcttaaagataactgcagcatcctagctaacaataaaaaagcagagcacatgcatgattatagatatgaatatatatgaatctggtgctattcacactctctccaaattgtagcatctgctacattttgcacataataagtattcaatgaaataatgggatactctaattatccctttttattttttacctttttttgtatgaacattttgcctgcatttatgtctgcgtgaatcatatcatgtgcggatcatggaggccagaaaagggtttcgtattttcagatcccctggaagttacagagttgtgagacaccatataggtactggaaagtgaacctgggatccctggaagaacatccagtacacttaaactccaaaccatgtcccaggtctgccttctaactattctttttaaaataaatttattgattctaagtgtttttcacatcatgtatcttgattccattcattccccgtccctttgcatctgccctccacctctgtacccccaaaataaaacaatattcaagagaaaaaatgaaaataaaatgagaaaaataacaaaggggaaggaactataaacgttgccatggaagcatcagtgtgacccaacaagtcaccccatatactcctttgtatgtacatctctacttgccagtattcatcacaaacagtcattggtctggttcatggccccaaatccacctcatttatgatatgctagaacatgtgaagggacctgacctgcagaccctacactgcagggcctcagcaacacagggagttagtgtgatgtccagcaagagtcctagtgagggctcagaattgaacacgtagtagagaccaggggcctcaaagcagtccaattattcttaaattccactttcttttttatctgcatacccaaacaaatgggaaaggcaatgcagaattcaatgccaaagcacgggtaatttttttataacactctaaaagttatcatgtggaagaatgtataatctgagggatggcagcaaaccaggcacaggaccaatgagtgaatgttacaagggatggagatttgggtttacattcgaactttaataaatgtggttggtagttctagagatacttaggaccttttccattctcccattagtcaaaaatccgaataactacatgtcaggacatcagagaagggagtctagtagcagattcaaacagaggaatgcacttctgtgtcaatgggtgatgttaaagcattttggttaaggggttaattctagaccttcctaattcaaatcccagttctaccagcaaacggaagacccatggacaataagatcctctggacagcaatgttcacatcacgtaaaagaaacaattttcagactaataggattaaagagtctactgctgagaggttcttagcatatagaaaacaaaactacataaaggccaattaaataagtgatactggtgataaggtttgtgtttttgaagaaattccccacaagattgctttactctatttttcacctattctccaacttgagcatcaatttaatactcttccttctggatatttcatttgaactacttaccctatgaggagttctatcacaatcagtgtatacagggccctcccttatagtaaccctgaattccataaattaggcattttgttttgtcatcactctttgtcatttgtctgctagggctcaaaaccacaaatgttgttctacaatttccagttgccctacctagtactaacaatagggaaaagatggcatttcatgacattttatatttattgcattattatcaccctgtaaggctacagaaaataaacccctacatctttaggaaatttaattttttgaaactgtctcactgcagaacccaccaggcctgaaactatgtgagtcaagctagctttaaattcatggcaatcctttctccccaggcttccagagtgctaactgtagaggcaatgaaacacaacttgtagctctaattcctacaatgaaatctgaagagacctgagaaagaaatggtatatgactttcccaagatcacataattctaagaactagatacataactctaaactgtgtgttcttttccaatgggccacaccatttctgaagccattactccatgtgttgttaattcagtcattttcaggtggctgagatatggtataataccatagcaccatagcacagcatctgtgaaacagtgagtaaagatgtgtcttcatgagaacacgtcttaggaaaaaagcacatttgatgtaaattataattagttaagatagatcagtccacattgttttggaagtaggtagagcgtaaataataaataaaataaatgaaattctttgtaaatgaaattactcgagcatgtataatagcgcaattcaagggtcaatgatttgcttcattttacaaattaataacaaggggtgaagtagaagagttgctactcataacatagggagctgccaacaacagcactggaaaacacaaatttgccagaaatcagaacttgcatattttctgcttttaactcttcaattatggtaaactgccaggcctaaagtgcttaactttttcaggacacaatagtttatttggtagatggctctaaatgacacccaagggcctttaatttagtagttttattagagttggaagccataagggagcaaagagcttactttctttggttgtggagggtggcattttgaaacagatcttcccaggcagagaaacttcatggaggtcaacttcgggcagtgtgcttctacttaagtcttctaagccccatggtactaacatacaaaaggatagcaacagggttcaagttttctatgttatatgctatgcatatggagtacttactttatacaccaggaactatcttcttcaataagcaggaattgacacactgtgaggtttcgattccatttagtaaaatcaagtccttattttatttaatcattgcttctgagaaaaaggtttcagaaatattatttcagggccaaatttatttctagtatgagaaattaatgggatttcttagcagtgagacttggagatgagcatgttcttatttctaaagactgttactgttcattttaacgagggcacaaagtccccaaaagttatactaagactaaggacacgaaaaaggctgatggttagaggcttgttcttacaggtctttcatcataaagagagtaagttgcattttttcttttcttatagaaaaaaagacatgtttaatgaattaaaatattnnnnnnnnnnnnnnnnnnnnnnnnnnnnnnnnnnnngagcaacatttactgcaatatttaactcggattcagctgacgcaccccattacatttcatacacagcattcttattattgataactcggaaactgcagattcttaatgcgtacaagtcagatggaaccatcgataattggtgagttaatttataatacaaatcaactctacattctatctgagtggcagcatcctgtgtaagagaatcagttcctttgtatgtgcatgtttctggtgaaacacataaattcttggactgatagcagatattggaaagcttatttttgtaaattagctatactttgaaacctcaaaacaagaagtcttttctgtgccatggaatcttaactacagtaaaggacgtaagaaataagatctgctatacttcaggaaaccaagagaaatcacatttcatgtacactgtttcagctcaaagaattagcctgtcacaactgtcagatgcagcaaactgcagtaatttttctttaaagtaaagccgaaatggatttggcaattaaaagcatgtgctggtgaaagaaaatgcctaccaacaggaaaacataaaaggccgtatttataatcatatttttggttttatacttcaccgaaatgtgaatgctttatcaagataaaggatgggccctgtatttctttctaaattttcttttttctcactccacttagaaaaaaattgatcacggcagagaattgcatgagtgtagatgttatagggtatctagccaccaaagaaccattcgttcagatggagatagcatagcttgctttatatattagaaatctttgccagatgtcctggcaatgttccaacaaggatgatgacagtcattgcactaattctcaggaactgcacataaagataatactgtccaaattgagagtgaatgaaactcacactttcaaggtccattataaaaataaatgctgccaacagatcccagccagagaaaaaaatctagagaaaagaaatgaagaaaacagccagtatttgttctttccaagttgtagaaggatttttattttaatctagaggatatatgggtcaagtacacaagcagcaaggtgtatgaaaagagatacaggggaatgggaaatgcatatgcataaaattccacaaaatgcttgaaagaaatctttggaaataaaatattttaaaaaggaaaaaatatatagcattttattataaaatcctcagggcaaacactttaaagtattccacattagatctcaagcctggagcataatttttggttcataggtaaccaaataatattgtttgaaaagtgaacaaaagtcactgagaatgattcaacacgtgtgtgtgtgtgtgtgtgtgtgtgtgtgtgtgtgtgtgtgtnnnnnnnnnnnntgtgtgtgtgtgtgtgtgtgtgtatacatgtgtggcatcagaggtggaacccaggcaagcacattaccagagatgtacacaatcccccccacacacacagtttcattagaaaaacaaatgtttttttaaaaaataaaacaactagccttatttgttccattaggatcatgcttatttgtttttgtttggtttgttttaagcagtgcatttcaaggaactcacatattgaaagcagtgtgagacaacagaagtcacacacacacttagtgatgccacatggtttattcctaaatcctgactttttgaagttttcagacatggtcatattccttatcctgacctgcatgaatgtacacatacccacacagcagtcatacacatcctaattaaattaaatcttttaaaaaagtatcaataatgcaaatctcatcagtcttttatctcaaacctaattctatcaccaatcaaaacagttggcacactttaacaaattgaaaactcaaagccatgcccttgcaatctaaaaccaaatcttctggtattaaaaaagtcatcattttaataactaaactgcacacaggtagcagagttgatgtctctagtatgactaacccatgacaactgcatttcatttttatttggaaagactgatccagtgtttttatagtcctccattaagctgtttaaatcaaaaagtaaatgttgaaagaggaaaccattatagttaagctctatgtaaactagtactaggcaaatctcaggtggctacagagttcagtctggataaataactagatctatactaacctctttaactggaaaattccagctcctacagggttagtactgcttcaggttttccaacgaatctgacatagtttttcataaatacccacactcaatacagaggtaatagtaaaagcaacttggggtggagggagatgtcagtggactttctcaaacaaagaatgtcttcagtagttggctcaacttgagagatttagacctccaactttaaaattccactagaaatttaaatctagtaagaccatgaacaagaaactatatgcactggaacttctacttaatatctaactgttgagactcaaaactgccaaacattttaagtatctgcaacaagcagcagctagtgtctggttgttcagtgaagctttttccactaggtgctggtcatcgaaccaagaacctcagtcatgctaaacaataactgtaccccagacaggcctgtgactcctcctgcctctgtctccctagtggtttaaattataggagtgtaccactctgataaactggattaattcttatccatatttcacctctcagctcaaagattaacttcttggggagaaacctggttgatggaagtggctttctttatgaatttattctacattttctgccatacaggcatatgcatttgtctaatgtttatttcattcttcaataagttaatgactccagagtaaggatcacattgttgttgttcactactgtatgtcagcattgctggtgcagaattgctttctgcttagaatggagaaatccctgtgtgaatataaggaaacacaaaagtattctgtgttgattttggtgtgagagtcaaagatgcattggcaattgttttggtttgtaaaacacagtttatctgatggtttcattacagaacatttcagagtagacttgatagtatagttttcctaagctgtgcaagcaaagatagtcatagatgcattacactaaaaactataaggaaataggatatattgttgaaaggaatgagatattcttctgtttcttctgtccccaacacacaacacacacacacacacacacacacacacacacacacacacacacacacacacttgtgtatctgcaactttctaatactggaatagttctgacttacttggaccacctagttggcatgtggaaacaccacctcatagatggaaacagagaagaacagcaatgacaacctgacaaatatggatggaactctttagaccagtattctcaatcatttgaaacttagctgttactctctgctagtaaaaattgtcactctgctagtaaaagttgtcacttctcatagccacatggtcaacttgactttttgaacactttttttttttaattgacagaggctttgatgtgtttggactatacccttcccctagaagcttcttctaaatcttcactcaaaaggatcttcccctgctctgaactgttactacaaccatgtatatggcactatatagagagaaaaattctgtggatcaactaggtttcattactaagttgaatgaattgcctattggctatctgaatttattatgacattatcctatatattgttgactttgctttctaatgtaagatttggagaggaaatatgcatgtcatctttaagtttaactcaaatttcttatgctttgtacatgaggcatatgcaggcattacaagaataactaaatacatgtgtgcataagggaaatgaaatagagcagaaggcaaaatctatgtgtcaattatgtactaatctatgaatgcttatgcagattttttagatgacctaacatatgcctcatcatatagtacttcaatatgtttaaccaattcatcatttttaacaaactcaatgagtttaaactattaaacctcataaaatggggattccaagattgaacaaagctattgatatatttataagttgattgttcacttcaaatcttaaattctgagttcttcaatgtaattaagttgggaatgcaacacaccccatgcctgtggtgatgattaaacccagaacttcacatacattgggtcataacctcacacccccaaatcttttttaattgggagttgtaatgagctttggtttattcaactaacaactaatattaaatgaattgccaagtgtatcagaatcatattttgtgtgatctatgaggaatcataggaaaatatttttaactatgaccttaatatgtcactagagggcaaatcatgctttggctcattaaacaaaactacagtatgtcttactacgtgcctgatctgagaatccaagagaggatcacacaagtcaacatagtaaacatttctttcaggcagacaatatgccaataagcttagcattttatttcttcatcgaagtggtttaaaagtacaatatcctctgcttattaacacttcaccatttttaaaaatggcatataattaaactcacacactatgcttttagtctcatttgcacttaacttcgtgttaagctctgtcacagcctacagagtgctttgcagttgcttcacctgctccagttctgtggtatatagcatattgcaaggaactgctatagctacttaataaatatatgctgcttgattagtagaagcatggaaaagatgtatttttgaacttggagaatagttagtataccaaattcttaattatgtgtaacaaaggagatagttaattcagaacaaaagataattttcagtttcatttgtttttggaatgtatttccatacagagctgctcatttgagtctctcggttggtttgatagtatatttccagccatataaacaagtttcagtgttaattctcaactgtgctcaaagcttggatgctatataaccaacttaaaaaaatgtggtaaggaatatttaaaatggctattgtacttttacactacactgttaatattgattgtaaatttgatgctatttagagacaccaagtaggcaaggctataagcataccagtagagatcaccaagactgggataactagagtagaaagacccaccacaaatactggtgacctaataccaggggctagagtcctggactgaattaaaaagagaagagaagctgagcacaagtatccatctccttttttttcttgaatactggtttgataagaacatttgcctctgcattaacatccatgatgaactacatcctcaaaattgtgagtgaaaatgaacgcttctttccttaagttgtgtttatcannnnnnnnnnnnnnnnnnnnnnnnnnnnnnnnnnnnnnnnnnnnnnnnnnnnnnnnnntttttgctaccagttttacactgcacgatgtcttgaaagtagaaaacataatctcattttaaaggtacaatagaatttagaatattatttttcatatagaagagaaaactaatcaaattcaaatagttgacacttttttactaaagggaatgggtagagattattttaagactgaagatctggacaccatatgaatatcttgcttcttccatgcattttctacattcggaggaatgcacctttttttcttttggattattgtaaaataggaaaaagcaaactcagaatttatttttttaaaaaatgaataaaacataactagaatgaggtctgacagcccagcatggttgcatttttctgtaattttaacatttgacaggtagagaaaggggggggggtcagcctgtaagacacaagagagtgtctcaaaacaaaacaaaacaaaacaaaacaaaaactgccacaaacaacccccaagaccttgactccaaacaattccttaaggaaaataatttatttctcattaataagattatagggaagaatgataaatggcatttctaaacaaattttcaattttaaaaagcatcatttaaagtctcattgattaatttatgtttgttttgtgtatatgtctgtgtaagaatatacgtacatgtatatgcaggtgcatacatttgaagtgtatagagaccagatgatggggtcaactgtctatttgtttggagggatgatctttgcctgatatagggacttgttttttttttttttttttttttttactaggatggcaagannnnnnnnnnnnnnnnntttccaattgtgttcaaaatataaatagatgctttatgttctgggtcaggcccatgacaaatgaatctaggtatctgctcagcaacattaattgtatagttccagttcttcctctaactgctgacctctagaaagcttgcctaaaatcctattcaaattttcactgtttatccactcgtacccttaaatcagtaactaatatgtaatcttcacaagttctgaaacattctatatacagttcaccaagccaaccagcaggaaagcagagcaagcggacacagtagcgagaagacagctttcccatgtgtgtccccgactcttaagctacactcacaccatcctgtccacaccctatggagcctggccaggtatacttgcagcgagacccaggaggcatggtcagggtgacccacatatatgtacacacacacacacacatataatatatatatatatgcatttgcacaatgtaataacttatcttcttatttttgcaataaaacagtgtcagtactaaatatattcccttgcttcttacatttgtatttaaacttttacttatttgtatgtgtgcatatgtgtgtatgatgtgtgtgtgcacacacagaagtcagagatgtcaggtatcttgctctatgactctccaccttatcccttgaggcagaacctttgagccagaagctacactgctggccagaaatccccagtgattctactgtatccatcgggcacagtgctagggttagaggtgtacatggttatatatgggcttttacacgggttctggaatttcaactcaggtcctaatgattctatagcaagagtacttatccactaagccatattcccagctgaaatttatttaactaagtattttattagttctttgagacttttatatcatgatcatattcaccccaactcttctccttaactcttcccatatccactcttactttcttatccataacttaatgtattcttggtttaaaatgtaaggaaaccaaccattttaaaagtctctctctctctctctctctctctctctctctctctctctctctctctctctctctttaattggagtaattctacacagacatttttttccttagaagccatagaatgccaaataaaaagcccagttacagttgtgggatatctgctttcaagttattgattaggggtatcccaaagaaagtcctcaaacaagataggcaattcttattgttcttgcttatctaacagataacttgtcagcaaaacctgatagctgaagatagcacacacattggtcaatggacaggtagaaatcaagttgtttctgatcaggaggctttcttcctgctggctagatttcacaatcattgaaggtgctatttaagcaggatacaaaatctgtgaattgcaataatgaccagcatggcaagatatgaccatgtgtgcaatagtggcacaaatattactagggcagccaactgctctggggttatatttaatgtcatttgttttttaatcatcacctaataagatgaatttactacctgtgtcataaagtttaagataaaagaaaataacagagagtattcaacaaaaactttaatttgccatacattacctaaggtatatcaggaaatgatacaccaataactgaacagttgtttcctatggggaaacatactgatttgtctttttacaatacaaaagtagtatatgtctgagagttttctgtaagagtatatataaatagatatacgaatattactattattacccataaaactgtgtatttaacttaacacaaatgtcatcaataattgatattttagtcattttaaattaatgtcaaactaaaattttcctatatctcctattatatccaacttattttgtaaatataaaaatggctcatctttgtgtctatgaatagatatgtgcatactttaatacatgtaaattatatacataaaatagccaatttagagtatttttacaagctctttctattatttccacttaatattaatgaatcctatagacaagtttttaatctcttaaaatgtagcttctgacgggaagaatgatgagaaattggcaggttgagggaacattaactctttcagacaaatcaagacccatttcatgttctggaaaatatgatttcccagacaagtctcctgtggcttgaaagggtttatgtatcctttaaccagtgatacattctcttttttgccattactatcatgccccaaatgtctatcaaattccctggacaatctttgaataatggagttcatgcccagtgtaatttcagcaaggctcatcaaacagataagtcttgagcatacggctcaagcataggctccattcgaagagttccttagacagcaattttaatagacatgttggctaagacataattattaatacaggcacattaaaaacaaaacatagtaaatctaacattagataggtaatagggtcatttctttggataaactggggccattctataataacaacctaatgttctctattttcttgcctgaacgtaaagtttcatatctttatacactgaactataatatattttacaaaacaaaacaaaaacatttatgaagcacttacctttctagaaaacatcacgccagacttgttgccaaatacttaatgatgaaaaggatgcacatcttaaaggtgcttatgagccggtgtgcaaaactggcatgtacataaacaagagtacaggcaaatgagtaagcaagatcatcaaagtattaaaatattatgagaacacaagggacaaggaaattaattttgattgctatgattaggaagggctttctggaggagatggtgtaagtgagcagctaatttttaaattagtttaccatcttttcaaaaagaacatttttcccacttgagagagactgcaagaaggcaataaaacagtttcacagggaatacatgtggaattcatctcggatttatgaacctctctgaactcaagggtggtgtaacatcatggttagaaacatgtgtcttgatatctgaaagaccaaaatttggatcaaaatcctcattaccatatgttaccacttctatgattcaactgcatggttgatcccttctagtcttctcatatttaaacgagtttaattaaaagaagcctaataatagtacttcacttacaggatttgccttggcgattgcttaaggctggcataactgtataacacacacgcacacacacacacacacacacacacacacacacacacacacacaaagagagagggggaaggggggaaggagaataatcatttctactctaaaaatctgaatgaaaaaaaaaaagaagtgctacagaatcagaatcactttgagcattgacatgatgctgcaggccacagataagatatcctattacaggtaggaactgaagaatacaggaagaacctggaggccaggtctgctttgatatgttaaataggcacatccaacaggtttgaaaattaataaccccnnnnnnnnnnnnnnnnnnnnnnnnnnnnnnnnnnnnncccaaagtgtctttatttgaaaagaagcaatgatcaactattttggattttggaaacaattttcttttcaatgtaaacattatatccatgggtctccccctctacccttaaaagaaataaaaattccatactccttcctatccaagccgttaaatgagacaaaaggattattttgaatttcctaactttttaagtttggagaccagtaaggcataaagggtaaggacagagtcagatgtggtaacactttctacaacatagcctgaaattctcagtttttctgtgaaagacagcaaatgtctccggctacaacattcgttagaaaagaggaaagagagggagggaaaaagtcgtgttctttgtttttgttttgtcaattccatatgacattttctttaaaaagaatggcttgtcatcccactgaaagctattcttggcttgtgctgaaaagctatgatgtgatacctctggctgaatagtatcaaaattttcatctatttaaatatattctgattgaggatagtgtaataaaaattaacataacggcagtgctgtggtgaccccaaatctgttctgaattgtctggaaagggcaatgtgcttcctgaataacttgatttgtaagtacttcaaatgactctccctcacactatgaggaaatcccaggtgttgatagttagttgacagggtgttaatgtcattaacattctgtcagctcttcttgtcaatgtgttaatggtgctcctgctgctcagtcactctctgtcctccagttggggaaatgatttagttagcagtcaatcaaaaagctaagctgattttgggccagagacagccttgccattgacaaaaatctctgtgagtaaatgtggtaagaaatttgtcaacagaatataagcagtaaggtcaacactgtgattaatgtgctttgttagacagtttgagatgttacagatggaccacagcacacacttaaaaggagaagaaagaagggcatggtagtgcacagctttaatcctcaacacaccagagacataggcaggccagtctctgagtagaaggtcagcctggtccatggagggaggttcaggcaggacagggttacaaagtcagccaccgtctcaaaaaacaaaatggacaaaaaaaatcaacaacaaaaaaaaagcagtttgactaaaattacaaacagctctctttaagagtgagtttctttactgtctggaaaagccagatacagtaactaaagtaatccctttcatgagagcctgagaaggaannnnnnnnnnnnnnnnnnnnnnnnnnnnnnnnnnnnnnnggtgggcaagaagcatgtagcaggtctcaagacacattagtacaaagcaggatgctttagcaaaccattgtgagctgaaggaaaacaggaaagccacagaaacaaggtcttttagactttctcctgactttccccagggaaacccatcagtgaaagtaaagtttacctccctcaacccctaaaatcaaggaaggttactagcttttgccttcaacacaggtgaaagttgtctgtcttgcttcatggtgtatggtgagtgggggctggcacacagtaacacacagaagaatcttgttgaatcctgctgagccttccctccctccacattattaacagtccataccacttttatctgtagtgatatattatttatgatttgacaaaacttgcctgagggttcagaatgcaaagccagtcgcaagccatagaggccaggcagctgtggtacagatctttaatcccaggacttgggaggtggaggcagatggatattggtgagtcgaagaccaccctgggctacacaagagtgaatcagtttaaaagagtaacagagttcatgcctttaatcccagcaatagagaggtggaaacatgagtgatacagttgtgtggagaaaggaaaataagatgtgaggtgacaggaactgaaggtatttgcctcagaagaaacatagagagcattgcactatgaggattcgtgggacagaattacccattttggcctgaggtaaaggtaaggctgctttgcttttctgattttcagcttgaaccccgatacccatctcaggattttcattacttgtgttacatttttctctaggactagatacttcttttatcagacaaaatgcaaatggacatttcctctggagccttcatgtctggaaggctcctttgacacatagagcagttaaacagatttctcatgttcttctcttgttaacctgcctttggttacaagtgatgtcaaccatcaatcatatcacaggtaagcaaagattattaggttttcttttctaaacacagaaacaaaaacaaacaaattacccaagtctttcacaattacagtgttggccaaggttgcaatgttacacataatattaatgacagggctcttagaagaaaaggccaagatggcaaggaattcattctaatagcactgtctcatatctttcaagtaagggttacttttcaaagaacagttagcaggatatgattctgaacctcagctcaccaatttccccaatagacctcaaatacagacacagaactcgtggtaattttaaaagatgaagagagatgacctttgaaatgaattaagaatgtgggactatggaaagtatctttatgagttattgaagttatcagtagagataaaagctattcctctcttaataaataggagctttacaaaatatcaactatataaaattaggtcatttgacaaatagtaaacagtcaatcaatgaaagttaattataacattaattattaatgggtttccgtccccaatcaagaagctatcttcaattggtacctgattaccaaagaaaatttattttctccaatgtcatttcactgggtatattaaccctacctacttcaggggccaacacaaaacaaactcaaaggtatttttatacaccttttgtctcatgttgctttgtccagcatttttgtcttactagtattttgcttgtataatttggttttcaatattgtggatttgtgtgtgtgtgtgtgtgtgtgtgtgtgtgtgtgtgtgtgtgtgtgtgtgtgtggagtgtgtgtgtgtgcatgtttgtgtctattgtaatttgaagacagagagaaagggtatggatttgcttggttagtgaggtagagaggatctggcaagagttgggggaagggaaaagactgagtaggatatattggatgaaataattgtttaccaataaaaaataacagcaaaaaacccaacagcaaaaacctcaaaagcaaccaaccaaccaaccaaacaaacaaaaaaaccaaaattccactattcaatgattaaaaaaaaagaaaaagagaaatatagataaaatcctagcaagctatttcttttaatttagtctcaggactagatagatgtacagcttggtagtaaaggacttgcttaacatgcacccagattagagctacatccctagttatctcaagaacacaaaaactaccaccaataaacttccaagactaggtttgtgatgagcatgttagcattgaagaataaatatttcccggactatggtcttttaattttatggttatataaaaatgtgtatgctgttccagacccctgaaagaggctgtcagtttggagatctggttaatctatggagtctctggtagtggatcagtatttatccctagtacacgaatggacattgggagtccattccacatagagggatactctctcagcctagacacacaggggagggtctaggccctgctccaaaagatatgatagactttgaagatcccccatgaaaggcctcaccctccctgggaagcagaaaggggatggggtaggggggcattgagggacaggggaggaggggagggagagggaactgggattgacatgtaaaacaagcttgtttctaatttaaattaaaaatttacaaaaaatgtgtatgcttaatctatttttctcttttggagactcatgcaatttaggctggccttgattttcagatcaaccttcctccaccttccaagtgccaggattacagacatgaatgccatgcatggctctatgttttataatcagataaaattaatttcatttttttcctctcagttttggcatgtagaatattctacttccaaatgtggtatctttaagttatttttgtcttctatatgaaaatatctgagataatagctctggaggctgagaatccaggatgaaggcaccaggaaattgatatctagtggtaattgattgtgccttattgttgtgtcctcctatggcagaggccccaaagagcaaactggcgtgtgtgtgtgtgtgtgtgtgtgtgtgtgtgtgtgtgtgtgtgcttgtctatgtactacatgcatgcagtgccctcagggccagatctgagatctatttgttctctattgttttttttctgatttttttatttgaattagaaacaagattgttttacatggcaatccaaattcccttctccctcccattctcccctaccagcccccccccaactaaatccctacctatcatatatcctttctgctccccctggatgatgaggccttccttagggtgccaccaaagtctgtgataatctttgggatagggcctaggcccacccccgtgtgttttgactcagggggtattcctgtatgtggaatgggattccaaagtccacacctatgctagggataagtactgaacttctataggaggtcttgtagatttccaaggtttcctcaatgaaatccatgttcctggtgtctggatcagtcccatactggtatcccagctatcagtctggggagcaagagttccctgatattcaggtcagttgtttctgtgggtttcaccagctttgtctggactcctttgttctttactcgtccttgtctgcatctgaattccagttcagttcagtgatgagttgtgagtgtcgcttctactgccacccgctgctggataagggctatcgggtggcatataagtcagtcatcgatctcattataaggggagggaaattaaggtagcctctcctctgttgcttagattgttagctggtgtcatctttgtagatttccagacatttccctagtgcctgatttctctgtaaacttaaaatgtctccatctattatggtatctccattcttgttatcttctattcttcccctgactcaacctttctgctccctcttgtcctctgcatccctcctcttcttcccctctcattctcctagctcccttcggcccctcttcccgtgctctcaatttgctcaggggatcttgacccttttcccttttccaggggatcatgtattgtttttataaggaacaaatttcacacatcaaagaagagttgttattcttatatcttatcaatcacttccaaaattcaccactgctttatacacagcagatgatgtgtcaaaagaaactatggattgggcacaaatattcaggccatagcaggaggaataatgagtgttataaaccgaaggagactgaggtaaactcagaaggcagaacctgctgaagtaggtcacaaaaactataattgcctaactcttcatctcaggagcaggccataaagaagctacaaagatcattctccttgtcttccctagtcctcagacatgtgacctgttccctgccctctactcagagaggtaaggaatgtcatgtggagaacctaagaggtatctgaacaaacatcttgctaaatcatctctcacccctctaattgattacagttggattacatcctttcttcttcgatttggacttctatgtaaaaaaatctataaaaaaaaagccctccttgccttttctttctgagggctacctcctatagcaggtaacacatttatcaactttatagctcctttcttaatctgtcttttaataggcatgttaagccatgcattgtgcaatgggtacagaaagagatttttttctaccctacactattttttctgactcagaaacaaaaaaaaaaattagacagaaaaggagaaacaaaagtgacatactttgttataaagctgctggcttcaagaagctagaagtagggtaactacattcacaggagaacactccttttaattttttgagacaatgcattacaatgtagctcaggttggactggaatttatggtaatcctcctgctactgccctaaaaccattgcgatttcaagcttgaatcaccatattggtaccttgaggactatctacttttctaccttaaaaaaataaaacaattactttagaatgtatggatcataaattctaaaattgatcatactttttaaaaatgtcaaacctaaaacaatgattcaatattacttaaatacttgacaaaatttatatggataatctttcagaaataattataaggaaagattactacttcttaacaatatccttctatatggagaaagtcaaataaggggcttggattccctaattcccaatgatgttacacagatttgctgagtgtctacattgtggtaggtggtagttaattgatagctacatagaggttaacaaatctgatataatctttgctaaagaacagtatatagagagtatgtaaatgctaagctgccatcagattatggttgagttctcagttgtgtgcactgtagtaatttaatggcctgacaatatctaggtataataagcattgaattaatgttgtgaaagagtaagggtacacatgagaactgtttgtcataacctgacctggtcatctagtgaagattcaacctatatgttcagtaaccatcatgccattgctgttatccatagtgctcttgatatttatggaggtcatagacatggaagtgctgttcctgaccggttttgtaactccaagttcttacagatagattatagttggttagataaagtactgtcatatttacttaatttaaagcatcagtgatctgaaacaaaactattggcagatgaaggaagcatctagagtcctgtatgacacatgggaacatagtattcattgtaaaacagaggccagaggccagaaatatggctaagtgatgaagacaaattccacaggacccaagtttggttctaatctcccctgtcagccatgtttttcaactctttgttcactagccaaaaggtattaaaaatatccaaaatacagcatacatgtggtcattttgcattttgcattcgtctttctaggagagtgaaattctcactaagcactcgtggagatttttcagaacaatactaatttaaacaataatttcattattctaatttattaatttatagttttaacagaataatattctatttttctgtaatgaattgtcatatttttcttggtatgaactgcaaagtcacactcctatacaattccatacactttctaatccccttgtagatagtcacactttggtaccacttaaatgaagaacatttcatttaaaaatgattaattacctgcataaaaagagaaataaagtagggagaacaggtgaagttcatgagggtttgaaattagtttttttttctttcttttctttctacatgagccgcaaagactcaatgttgcaagctgttgtgtggccataagccaagtgtaaaagaaaatattccatgacaagagtcaacatgaaaaggtgaaaaaaataagtcaagtcaccaatgaagtgaaaggttcatattaggtgtctcaatgtgtccagttataaaatccaaggatagacaaggactgcctgcttgcaatgcctcacaaacttgttcttccaatattcctgtttacaaatgtaacatcactaaagtactatatagcattattttatgaggcaaaaaaactaagagtggaagacattttatataaatatcaagtactggtcttaagtaattcttaggttcagtgtcataatgtctaagttgggtaggaaagaaacacatgaggagaaaaaggcgataggtttaaccttggaagaaggtgacttccatacagttgttgaaggaatttacttattatctgataaagaaattgcactatttattccctctagagatataaactagtgaatcaatctgcagttcaagatacttatttaaacccagaggaggaggatatggcttttacttccgaaaacccagaatagaaaaaaaaatcagttctgaatgtagtttatcttcagacaacagcttggacattaacacaattcaaaacaaatgtagtttctcataatctcctttcaaatgcgcatagacacacacacacacacacacacacacacacacacacagagtttatcagtatattatatgcaaaatgagtttcctaaatgtttatgtagcaagaaatatttacttttctttatacatcagctacttaccaatttgtttctctttccattcatatatctacacatttatatttcagtctactgacattacatattctctcattgcttctcaaaatgcatttataccctcagaaaatgcacatgaatatacccaaagaaagaaaattataacacttcctccccgaatcattttcttatattgactctatccttaagcatttggttataaaagaggattatttgctttgttctttcaggtatgatcagacttcctaagacttaccttgcatatcttgtgggctttcaaataaaatttatctttgagaaatggcaacttttctgtctaattgttcccttgcttacattaccaggttcaaacatcgtgaaatgaaatttatgctgctaatataaaagcaccttacacacaaattcatctaatggtgtaggctagtgagtctagaatagatgaacagatagctacacagaaaaacacacaaacaaattcttaaataaaggatatcgtcatcttttccacaaacttatcgtgttgactgtcttcttttgggaaattcttgatgtcacgctccagatgaagaatgttttgttccattgctacaaggttgctcttgagagtttgagctgaaactacagaacaatgtgcaaaatatttagaatctttcactgggtattacacaaaataaccaaaaacagtatctactgaatatttttttaatgtggaaaattgttccatggagtcattttcacatttttctcaattacagctcttaaaaattcaactctctatgaattaaatgaaaatgtgtaatgtaatataccaaaatcatcatatttaatatgggaatgtcatcgttttactcagccattagttcagatgaacccattcctatttaaatttattgatgaacacctaatatttcattctttaaaatctaaattgaagattaaagagaaactaaggttcaaagagatcttatattattaatgcatgtccttggttatataaatgatgagaggttaaattatataaaaggataaaatgtttgcttttttttgaaaaccctgagttttatgaaccaacaactatggtacaaattcccatctttaagatttcatactcaatagagtcatgtaaaataactgttgctacagatgttgagtttagaacaaaccctagtgaatataatatgaacctacaaatatatacacacaaagcttcagcatgtcttcagacacaatcattagctgtttaattacccctaatactctctgctcttctccttttctctcattgacaactaataatttaaagtgttgtatcaaaactgctcctaaatacatgtacactttcaagatctctcatggtgctgtcattcctggggtgtgttaaaaaaataagaaagaaaaaaaaaccttattactattttctactacattattatatgactttgaattgcatacacagacacttctatcaataccaacagaatcagatgaaattccagttgaggagacaagggaagggttacactggtttttaaatccatatttctgaaacagtgttttcattaaggactatgaaacacaaatagaaaaacacagtttctatttcggtgaattttatctattttagagatatactagcatcacaatgaaaaatttaagagactgactaaatcaaccctctggcaaatttcagtcagattattctgatccaaattcatcaccctgacaagcttacctttataattcaacaaggagaaatcaacttaatatacatggaagttcaagagactgaaaatcaaatactaacactgaagattattttttctattaatctgtcagtataaatggccctgtccaatacagttccatttgtttagatctgacaagctggaaagtattctttattggagaaattggagaactactgttctgccttgcaaaacctttgctaatgctgcagcaattactgctcttaaaggatgagtttacttcgaagcaaatcattctgattttaaaactgaatttttatcatttgttttctttctctgtggtctcccgaactattcaaaatgtttctcttttcccatcctaaatgatgactggaaaaacaaaagatgtaaaattgactggttgttgagtcacttgggttacaagaagatagggtgtgtgtgtgtgtgtgtgtgtgtgtgtgtgtgtgtgtgtgtacataccaaaggattgtttttaaaatgtgatataggcctccactcacaatgtactacactgaacatagacatatttcttcttcctcatttcacatttatttccatttctccattcttcaccaaatcaactacaacgcaatgatgaggcttgggatattttcgtaagaaagctcccatgccataaaaaatcagaataaatttacaaaattttcttaacctgttttcttactgaatttttagtaaaaaatattttcagaagtgcccttaccaattttacatgtcagattttcaattctacaaaaatttgttcagatttgttctctaaattctctacaatttcattgtcaccttctatattgctccttaatttgtcttatgattttattaaatcttgagctgtggctggggttcagaactaatatttctggcatgctgagtattttggcgtcaggagattgaaaggcctaagaaacaaccactctttgatctcctattctgacatcttcagttactgaatctaactttcctctttctaatgcagcttgcccatagaatgtagaattcttcttcccccaaacaggtcacggtatctagaaaggtccctctcttttctcctgaagattttcatttgagaagagtgatacttcacacgtgggaggaaggattgttacacaaatcgcctatcagattctttgaaagtcctgatacattgcccctgccattctattagtatcagattgtccaaatgacacctctacacagctctttatttttgaaggttcccatgtcttacacatgtattaattatactagccatactttcatgctcatttatataaataaaatggtagcatatgctacatatgataatcatgtagtatatcaactattatgcagttagtatatcaactattatgcagctataaaaaagtgcaggattgaaacctttctataaatacacataagatggaaggatgcaggactaaacatagacaatgggaaattatggaaaaggtcaaaggatgaaaaataatagaaacctttattagttcctctgtactacatttgtaatgaattattaatattgtaactgaatataagggtaaaatacttgagacataataacctaattctaccttacatgcaaatgcaagcatttgtagcattacacatttttctttacactgggggaaatcattttgactttgacttagcagtgatattaaagggaaatcggaaaaaggtagtttacaaagtcgaagtccccgagaaacagagcttatgatacagtttgcttattagtattttattgaggtatttattagcatttttggaagtgagagtataaaaggaaaaaagaaaatagtacagggttaagttactgaactggccatagctttacaactacagttcactgcctagtgtctcaacatcattccattactcatttcatgagcatgaaacctatacacatcacttggggttcccatgcttaaaggatcactggatttgtttaatgttttcacattactactttggaaaataattttttagttccaggctacattgccattttcaccttgggttttacaaattatatggttactctttacctccatagcaaacaaaagtatgttagaagagttgacttgagggaatacccatttcacctacctgctggcttctttcaacaaatgtttccaggggcattaataaaccaatttggcctggctttggagttatgtgtgcatgtatgttaccaaaagggtacctaggaaatctaggatatatacatactggatccataacacagtattctttacaacctaagtggcttggttagtttgggatatttttgacaatttatatcattcattttgaataaataaacaaattcagcatacttaaactcttacccattagtcttaaatctgttttgtagaaacagtaatcaagtctacacttgatttttcaggaaaagtattggttacatattctcaatctagttaagctataacttgtttcttcaactagtcttcttatggtattaactttcttgtattttccatcctccttatggtattaaattccttgtatattccattcttctcccctctattgctcacctcccagcataaaacttctactgtatacatgctgctaagaatgaaatagtgtagtccaaatctaagaaaataaggagacacctcccttacctcttatccctactgtgctctgattgaatttattagtagtatgctttctaatcaagggaactaaacgtaatctgcgttttttggtacatagacttcacaagatacatggattttagatctgggaagcaatgataattatatcaaggaataatcagtttgttagaaatatagggaagttcaaatttaaagagaatctttggagactaaaccatgtacaatagtccctaggtacatttaaaagatattttgtcttcctagaattttataaagatgttgaacagatacaaaagtgttgaaaaaacaatgatcatggacttatctgctggattacttgccaggaacacactgctgtaatcttaaaaattaatagctggagtcaatgacatagctcaatggggaaaatgtatgccacacatgcttgacaatctgagttcaattcctgcaagccacataaaaagccagatgagaaagcaagaatcccacatcagattgtaatccccacaatacccatggcaagacaggagaatcattcagaagtctgcacacaatataagccagaagtctgcaagtaagataagcctgaagaaggctgcaaagcaacagaaataggagactgcttccaacaaggtggaaacaggaaacctattcccataagtcatcgtctccatggacacatgtacaacacacacacacacacacacacacacacacacacacacaaagagatgaaactttctaaataatgatttggtgggggaaaaaatcttgtatcctaaaaaacagtaatgagtatttatgtagcaccaagcctacctaaaaagagaaggcgggagggggggtgactttcactgttgctgacagtacctggtgctccaaaatatttaagcactgcagatggttaggaatgcttgtctactgaatggcctcaggctgaggttgtatttttgggcctgtcattatattagtccactaatataaattaaggagtcttttatgacagtgcaacattttctatacaagtaaattcccagcacagacatttttaatgactgattagtcagtctggtggcacttcatttttttctcatttcatttttacatctgctattgaattactgaatctgaattataacactaaaaattaaattatagctatctggttctttcttatagctttctttcatgtactccataaatatccttttaagcgtatatactctcttgagttatgcataggagaaactttccttacaaatcttatttatctgctagcttctgttgaaaaatatatgtatgtgttttcttggcttcaagcaaatatatgatagtggcctgattttttagtcaaattattttaatttattactttaagacaagctaagtataaacaatattttaagtgagaaaatggatggaaagactcttcaattactttctatataatagaactaagaggtatttaaggaaataaaatcagtatgctggtgacattctgtagattgtatttataatgtacaattttatgtaaacataaaagttttacacaggaacttggtttttctccctcttctttaacgttttccatcacttttaaacactgacagagtaacagaactgttcttacatttgagcccaaagaaaggtcacgtaaaaacttcctcgtgtaagactctaagtgatcagtctcaaatatgactacaatccttctctaattttctgtaacttaatacattcagttgaattactatcagctgagacacaggccattaaaatgtttcagccagaaagcacgtgtgagaaagagacattaaaagcactctgaagaatgggcattgttgtattctttatcaaatgcatttataggctaatagtgtcactttatatgaatgctatacatggaaatggagtgaatgtgttttatataatatcaaaggcacaatctcatcagcatgggcttctttggactttcaggaaaataaatgggaaatgggacctagatttgaaattcctaaccctaccacccccaaaagaaaatgttaaaagtcacacatacttaggagaaaatttttgtttaaaaacttaaaagaacattcaacttagctacccatctttaacattctttcttctattatgggatttggcagggtactgctatatagtcaacacttgtttgaaactcactctgcaaatttcccagctgtgattacacatgcatgccagtttaagtagcattctttcttttttccctccattttttatttaaattagaaacaagattattttacatgtcaatcccagttccctctgcctccccttctcccctgcccacccctagggataagtactgatctactacaaaaggccccgtagatttctgaggtctcctcactgacacccacattcatggggtctggatcagtcccatgctgatatcccagctatcagtctggggaacaagagctccccgttgttcaggtcagctgtttctgtggatttcaccagcctggtctgaacccttttctcatcactcctccttctctgcaactggattccatttcagttcagtgtttagctgtgggtgtctgcttccacttccaccagctgctgggtgaaggctatactatggcatatgtattagtcatcaatctcattatcaggggagggcatttaaggtagcctttcctctgctgctcagattgttagttggtatcatcgctgtagatctacagacatttccctagcgcctgatttctctttaaacctataatggctccctgtattatggtatctcttatctagctctcctctattcttcccctaactcaaacttcctgctccctcatgtcttcttcacccctcctcttctccccttctcattctcctagctccctcttccctcatgctcccaatttgctcaggagatcttgtccttttccccttctctggggaactatgcgtgtttctcttacagtcctccctgtttccctagcttctctggtcgtgtggattgtgggctggaatagagacaataaggaaaagtagccttctttctaactgtaattaaagcctatgtgttccctccacatgttcacatttccctatatcttgtccccttaaacacaaggcagttttctaaactgaattcacaatgtggtctgaactgaaactgaaagggaaggaacagcagtaactaaacacaaaaattatgacatcgtttgccttttaaaaattcagcaaaggcatttcagcttctggtatcatatgtctgttgagattcgaggcatgaaatcctcaatctgaacacattatttttaaataaagaaatgagactctgactagagaaaagaaagaaaatttaccaataaccagtgtaaggtctgactaaaaggttagctgtattgaggaggaaggagaaaagagatgaaactttctaaataatgatttggtgggggaaaaaatcttgtatcctaactacaaaatcaacagcagtggacagctgcccgtgaagaatcacactcccttcacctgctgtctcccctgcaactgttattctgcctacagcaaatactatgtgtgaattttcaaatcaaaggtgaaaaccaaattgaaatctccagcttttacagacagtcttagctcaaggataggattgagaagtacacagtgagctgaaactcttctaaagtaatgctggacagagtctcattggaatcatttgctctccttattagaaaaagaaacttcattacagaagaaggttttcattaaataccagcagtcaagaagcaggaaagaagggactgaagttattctgcatgtgctatgtatttaaacctgatttcaaagaaagaaaagaaatgagagggaaaaaaaactatcattttctttacaaaaataaaacaattttggaccaccaacatgtcaactcttctatatagagtcaatttcaatgctgtaaatgctattctcattttttgttgtttttgtttttctatttttgagacaaggtctattacgtagtcttggctgtcctggaacctgccatgtagaccagagattcgccgccctctggctccagaatgcttcgattaaaggtatgtgacaccatgaccagtttgctattctcaattttttgcttattttgtttgattaagaaaaattgtaactaatattaaaatatagttttcacattcattttctttacagctgtagagtatatcagtggataagcccatttccaattataagactatcattataatgaataggtttgagttcgggtgacttaggacttgtaaaaaataaatttgacacatcctcaccttgcaaattaaccctcaaggtgtaagagttgtcagagtcatggacattgacaagatcaaatcacatattctaaaatagaccaacatatataaaaatgctaatggtataaagacacatggaaggatataaccacaagtagaatatatacattctctcatgcgtttatttttaacatttcttttatttgggtgagtctaatataattacataatttctccagtccttttcctccatttaatcagctattttcaatttttataaaatctttggcagtgttatgtagcaattcccttctagaaaattcttccatctttgagtgaagcttctgaagacacaagatgttctaaatggaggagaaacatttcattctgcagggtgaacttgttaagctcagggagtaaagaactccaatggttcaggaagttcctgaaactgacaagacttactaggctcttccctatccacacacatataggcagtaagggtcactcagaaactctcaaaacagctcagtcacctaaaagagagacaaattgagctgcctagcaggatatcagacaagctgacctgcttagaaggggctcagagcagttgagctacctggatgagacatgctccaacctgttgaggtgaattggacagtgagcccaaggtttcctgcattcataagctgtcacctatgctggagtgggtttgatgatacagctgtctatgagtcgtttctgctcttgttagtaacctatcatacaatttttgagttaacttcacccaaacttactggtttcagcaagttgcaattgggtagtttttgtactttggtctggggttagtaaacagttgtgcttgtctccacaggagtagtgccacacaacaggcagaaccttctgataaatacttaattatttcctatactaagatcttaacttctgaaatatatgcaatgtgctcttccttttactttagaatcagaaaactaataacaaaagcaaatagtgtcaaaatatgttacttaatatgacaagagaaaggctgaaaatgattagtgaagttatagaaaagcaaagcccatagaaagtgaggacatgttgactaagcctaaaaggaaaaataatccaagtttaagaaatctaaagttttaaatttgtataatctggaggttttaagtacatagctatttgtaggatttattctgaagtttaatgatgaaatagctactgctaaaaatgaaatcccaaagaaaagaaaatcatgtagaaaacaacttacacttaatactgctgaagttgtgataatctaggatgataaaatgagcactgtttctcatggagacacaaactacctggtttgttttgtttatttggttggagattgggtttcattgtgtagcccaggctaggccagaagctcagctcttctcatcattgcctgctccagtgctgagaacacaggctactgctaggaagccaggcttaacttcttacgttggagtgtgtattcacaatgccttcatgggagcagtcatttagtagcatctatcttccagtatataatatacttagtaaggtataaaaagtgcagatggattgctaaaccatgccaatgctttctgagcaggaattaaatatatgcagagaatgtctttataaagctaaaatgctacatgaaaagaaatatcatcttgggtctactggtttgtgatcatggccaaatactttaggaactgtattcttgaactcattagggaaattactaggcttatatgatatagtataactattcttgtacttgacccagttttgggtgggaaacatgtttaatgtatgaagtccccaggtaagtacaagtacaaagtcatcaatttcacttaaattgaacagaggttgtcatggcatcagtggcattatgctgaggtcataatgctggagccatttcagtctattccacattactgcttcctggattagcaatttttctgtatgtaatagggttgcaggtcatacagaagatgcttgcaggggtctattaactctatggttgcacgtcctgcttcattatcttactgtagagactagcaggattgctatatgcccagataaggtaatgcaaaataagataattaaaagaaatatcattttgatagtttttggagatcttcactactgaaaatggtccctacgtaagacacagcttgattatttatctgattatcaattcataaatctactaggaatagatatttttgcctagtaccaaagaatggtttaaaaacaatacagctagacaggcaagtgggtcctcacgataagctctttgggtgtcacgctaagtacagtgggaaagcactgaaaggtttccagcagataacaaaaggtaatagagatgttttatatttgcagtagatgaaatgtgcagggtaagaaaggaattagtaagaatgaggcccaggtttctggcatcaacaatagacagagcagtattatggaagctatcaagcattaactttagcctacttactcttaaatacaagggtcggccaagctgagatttcaaataagcagctgcctggtggagcaggtctgcctggacactggatgtccacaggcatttgcatatagatccccgcttcagtaaagttacattgtttcagcatattgccatgatataatttagtctgaagttactttctggctctataaatctaggtaataatttctgcatccctgcctcatttcaagtacaaacatttctagatgttggttaaggtcatttccctctgggctatgattgtatttttttcctacttcctctctttccnnnnnnnnnnnnnnnnnnnnnnnntactctactcacacaaacactatggatatttctattaagatgttttgccttgctgagaagtcttgctgtaacacttctcttgaaacaaatgttgccaataacaaccaggaagctaattgcatttggaggtgacaggagttcattaactaaaaaaactacaaggcctgaaaactataaaatacctgtcagaattttgcctatgaggaggaggaaacacttcaaagacccagctgtttctattcctaagtcataaaattggcacattaacactggtacaagggaaagaatcaaaggtggttaaggcaataaaagtttcatctttctttggccccaccttctcttactggctccactaggcttattcaatatgtcttcttcctgcttgtagatctacaattttattttcttttggggggtgggggtgggggttcaaggcaaggtttctctgtgactttggaggctgtcctggaactaggtcttgtagaccaggctggtctcgaactcacagagatctgtctgcctctgcctccccaggactgggattaaaagcgtgtaccaccaatgccctgataggcctacaattttcttttagcgtatgtatatgtttctcaccttcagtgtttttgccttttgaacagtcattgcaataatttgcttcagttccttattggtaaactattttttgggttttgtttctcggaaaagagaagcacacacctctaatgaaagtagaacaatgtgatcttacacatatccatttttatttccacaagagtaactgcaatcctaccctggatattaataaaagttttaaagaagccctctattcatttttaaaatttgtatgttttttcttttgcctgcatgtatgtctgtctgtgtagcacatatatgcagaaggtgttggattccctaggactggacttacagatagtagtgagctgtactgtgagtactgagaatagaatcctgatcctctgaaagagaagcaagtatactattaacaggaaatactaccttctgcttttatcatataaatggaaccctatgagtccttatacccctgcatccttggcatgggtatattagctataaactgttggaaaaaatgctttctaaaagaaaaaaaaaggtttgttgaagaaattcacaaggtattatttataatagtataaacatgatgtaaacagaagaaccaacaataagggaatgattgataaaagcttagtacaatattatgaaaggtgtatagagtttaatgtgaaatttatgaaatggattaggaaagtagaacatacaattttatattaagagaaaaaaatatcagtttgcagactgtgatctttactgtgatctttatttaaatggaaattacctatgaagagggctggcatatcactaatgcaaatgcttgttctacatgaagtggtagagtatttgtgaaatttggatgacctggatctagccaagtgaagatggaagtctttaaatttatagggagatattgttaataattcttaatgttttccttgttcattcacttatataggtagaaaaatatttggcactctaaagatgaaagaaaagtccagagattttcaatatttgggcaaaaatacatacaagtataaataagtgtgcacatgacctacctaaagatcctttgaatcttttgaaagctaagagacaatttataaaacaaggaactaagaagggaaactggtcaccaatagagttctgaaagcaatgctttgcatataataccccctcactttctccggattgggggctggcaaacagctgcatgtagaaaaagctggcttcttgtttgtttcagaatggtctaagataagaatgctttttacatttttaaggggttgaaagagaacagtgtcttaaatcatgaaaattgtatgaaattcaaatttttgtatccataaataaagtttttttggaatacatccagccccattcatttatgtatggacagtggctgcttttgtatcacaaaggcagagtgaagtccttgtaacagaggatctatctggtccacaagacctaaaatatttaatacctggctcttggcagaaaaatgtttgctaatacatgttttagatttttaaatgctatcttcggagggacatcatcaatttcccagtccagatttctcataaggatataaaaaaaaaagaaataaaatatggagtgtcacagaggtgcacagagttaggcctctgcgttttaggttcttctgtaaacataatgccacaaggtatctttgcacatagtttctttctatctctcaaagggtcaaatgtatatagtcagttctataatgtagagtaaattatataagtttctgcaacagaattcaacaagactatattaatatataaggatggaggaaaaaaacagcatttttaaatagcaaaaagtcgacaagaaggggaaagggacaagatctcctgagaaaactgggagcatggggtaggggagaaggagctaggaggaagagaaggggagaagtagagggggaaggaagacatgaaggaccaggaagattgcttccggggaagaatagagtagagcaagaaaagacataccttattagagggagccattttaggtttaaagagaaatcttgcactagggaaatgtacagggatatactaggatgaccccaactaagaatctaagcaatatggggagaggctattttaaatgtccttcccctataatgaaattgacgactaccttatatgtcatcatagagccttcatccaataatagctgatggtcacagaatcagagacccacagctaagcactgagctgaatccagttgtagagagggaggagtgattagcaaaggggtcaagaccatgctggggaaacccacagaaacagctgacctgaaaaaagaggagctcatggactccagactgatagatgggaaaccagcataggactgttccagaccccctgaatgtgggtgtaagttagaaggcctggacagtctatggggccactggtaatggaacagcatttatacctagtgtagaatggacattgggagtccattccccattaagggatactctctcagcctagatacatgggggagggcctaggccctgccccaaatgatgtgacagactttgatgatcctgcatagaaggccagaaccttaccatggagcagaagaaggatgggatggaggtcagtgggagggcatgggagtgagaggaaattgggtttgacatataaaataagattgtttctaatttaaattttaaaagggggaaaatctagacaagagcaaaagcatactagggaaaaatttcttctaaaagcctcaaagtaaagaaaataaaaatgtaaccaacataaagtatgcagaaattcatagccaaatcctataatgctaggcaataaaagcagaaaagtcagccactagaaagaaaaatgaagttcaaccttaatggaaaaattatcactgcagaaaacaagataggacaatctagatataatttttcatcccaatttatctctgttatgttgctatatgagatggcttactcctggagtttgctaaaggtctaataactgacccaaacatcacctttataactgatttccctatagttacaatatgcttaaaaaggattataatacataaagaaattacaatgctatagcttatagtgttaacaattatgtctcacccacacattttatcctcaaaggggccctatacaaaatatcttgttactacctcaattttacatatgagaaacctagacaaagtgatattaaaaatgtcctcaaggccacataacccataaatggcagaaccaacattttgaagttaaataatctgcctatgttttcaaccaatttgctccactttctcttatgtacaagagttttaggtaaacagtatttctgaacaagggaagcatagctgtactaggaatctggcatccttttaatgcctgcatttaacacacagcaattttgagactaataatggcacaatagtatccttatgaaataacaaggacaagtaagtgagagtgaaggacactactagttctgacttcatggggcttatgatgttgtaagtggttttaaacaaattatagaaaatgtcagatttctgtcctactaaatagtgaggaagaaaataatttttaaaggagagaagtaatgtattctttgatgtataggatagtaaataaaagagatagattcttgttcacagtgaaaaatacgaaaactattctcatctgtgaatgtggaaaatggactcttgtgctggaggagcacaattcccaagaggggttgcagttttgaggggaaaattgtagggagtcaccctagccccgcccaatagtcctggggcaggtaccaggtggacccagggactcgcccataagggcgtggtgaaggaaagccggaatgacgtaagggggcttcttaaggggctgcacgtggggacggggacccctctttgttctggccgcgctggctgggttcttaacctagctctggcctgtgtttcacccggctgtgctttgaaataaagagaccttaatccaatagaaaatagcatgctattctgacttcacagcaagctagggttaaaaatctgactgcatcaggttgacagtgtgacttttgtctcatatgtagaagttgggatttgaagagggcaatatgaaagaaagatgaaaaagtaaggtggcataagataaaaacacagggctaattctggatactatgattgaaatgagagaggagtgattagcaaaggggtcaagaccagcctggagaaacccacagaaacagctgacctgaacgagggggatgtcattgaccccagactgatagccgggaaaccaacataggacagacccagacccccttatttgtgggtgtcagttaggaggccagggcaatctcttaggcctctggcagtagaacagtatttatccctagcataggaatagactttgggagcccattccacatagagggataatccctgagtctagacacatggaggagagtctaggccctgctccatatgatatgacagactttgaagattcccccatggaagacctcaccctccctggtgagcagaaaggtgatggggggctagtggggggcagggaggaggggagggagagggaactgggactgacatataaaacaatcttgtttctaatttaaattaagaaatatgtatgtcatgtgccaagtgcaacaaggagggaatacacagattgacagaaaagggagaagaggtaagaaaggtggtgggcagaacagaacctctggagatagggatcttgatggcagccatatgccatgcaatgacaaagtttaagggtcacatgtattgtagaagagagaaatggagagaaaaaattttgactcaactcaggtgacactgtgagaaatggtagttttatcactttatgattttgtcaacctttgccttgtattgatcactaaaaggaaacatttattaggattattctttatcatattgcttctgctttgataattttttccttgtggatggtttggtgtcattccttgtttgaataaagttttagaaggaaggagaaaaagaggtctgttgaagggttatgattagcataaggagtcaaccagattttaatagtgataatttatcatttttctgtggaaatgcagattgataaaaataagtgtattttggttctccaatgacctgcattaaaacctcttcaataatctcattttccatattttcaaagtagataataaagaagtaattgggaatactttgaaattcataatgacatgttattgtaagagtggttttacttattcaaattacattgaatttacaagtcacatggacatacttggataattttaacaccagactgtaacttcaggagtaattttttcttaaaaaatgtatagtgtcataaaactacattgaattatttgtagttatagatactgttgccatctctatttttaagtggccacagtatacagaaatgaattcataaaaaaaaaatccagtgatccagatgttgagatgagtgaaccattccttggctgtaatctcaacatgttttgtaagccaattaagtcttttaagcctcaagagggtaccagcaaggaccctttcaaagacaatccattgaagaaaagctagaaagaattaataggcctcaaatttaatccaaaaatggccaatggtcactttagacttgtaaacaaatgtgtgtaatattggccatgcaaatttcaattctgtataacagatagtaaattcatcatatgccttaatgattcactttgataaaatcctaaggcttctcataggatccctaggtgaatgtataataagtacacaacaatactgcagcaacaaaagagctggtctaagactcagaaggccaaattcccatttattttccgtatgattttgggaaagatgcataatcttccatcctatatattttcatttgcaaaaaaaggaattaatcctgcctacctaagtgatcctgtatgtgtgtgtggggggaatctaaaaatgataatactgatactactactaatgttgccctaaggaaactacctggcaactgaagtgggcagctccttaagtttttatggaaagaggtaatatttagaaaacaaaatacagtatataaagtctttttcacattgaacactacaaagctgccaacagagagaaagcacttaatgctcctacccaactgtgacacctatgaacacaatgatcgcatggcatgcttatccataaaggtcagtaagtggcacttgcatgtcactagcaaccaacagctgtctaattggagttaagtcatactcagcaggagggagataatgcctggtactagaaacggtactatgcctagtgagcttatggatcttagaagagaatctaccattgcaacttcgttagagcagcacagttctaaatcttatccatatatccacagataagtgtagccattcaaagaaccttttaaccaccaatgaaaaacagaaaatgacaaccatacacaatacagagactaactggatcatgaggagcccattgtcaatggatgcatccacatctcaactcttctatctacagctcaagaacaacaaggaagaggaagagggaagactcttaagagccagaataccaggaattctgctatggaaatcttttagaaaggcctgcatgaacatgacatccacaatggcaatgatcaacagacacgttaatgtgggaggggggaaggaactggccaagaaactacaggcaactggtgactgctcagagttggagagtttgctgctcctagacatgagctccctaattggttgtacaatacaaagtggtcaacccaggaaccatacacaaacataacaacagaaatagactcagcaggttatatgtatatctatatatgtaacagtaagaaatcagaaagaagaggctaccaatttgagcagggtaaggaatgaacttagaaggggctcaagtaaaggggaaagtaatataattatattttaatactaatatttaataaaacatataaaatacctttcacagcaatctatgtattctatagcaaagaacagtaacatttgttgttatatcatcaacctagaaaaataattatggttcattttatacaatattatatagtataaattaatctgggcacctttattttaatatttgtgaagatttcattccttttccataaacaaaatgactattttacacatggaattcttatttgagctcagtgtaatacaaactgaactctaaatgcagatttctttcattctaaatagtagttggggtttttcatggtttcatttgctgccttttatgttgcatcttgccatttagatggaagcattccccagaacctttttgctctttttttcctaaaagctcttttttttcttaatgcatttctttttgataaaggattttgttataatatacaagctgaacatctctatagctaagcaacaacttcttaaggaagtcttctattctcatgttcaactacacagtgtcttatagcttcacaaatagcataaccaaccctagcagaccactgtaccactctcctagctatcattacttgaaaccagaaatctaggctttgctatttacattattaaatagctccaacaagctaccaggaagcacacagcattatttctcaaaacactttgtccatcttttaagaaattatgaaaaatcctgtttttattagtgtggtaaacatataaatcaatgtgttccattgtgatagtttaattggcatccatctttttcattttattaggagtgacacttttctgaagcttacaatcatctgttagattactgaagctggttttcgtactttcgatctatcccacatgataccttggggggaaaaatgacttttagaacagtgatgtcaccatatcactactgatttgatgatttacgattaaaaccttcaattacatttgaagtccccaaagctaccatacgttactgactgaaattagaaactaatgaatatgattaataacctgaacacaaatgaagagatttttaagatagaagataactaagtactacagatcagtgggaaaatacttgctatataaatatatgtgtttcctaaatataaaaaatcagtcataatctccatggtgagcataaaatgaaaatagttttaatcaacactatgcagcagccttactgtctctggggaatgaagttttcagctctgcttttttaacacatagatgggccaagtttctctctgtgctgtgtattataaactacaatttaaatcagttctttaaacatgcaaatcatggttcatacagagactcctcattgatcttgtaaaggccagctctcagctacaattttgcatgacatagaaggcgaaatatcaactttgccaagataatctcattttattgcatttcgacagtttcttctctgcaaattgttggtaatgtcaccctttaatgagcagagaagtacagggattctaattttatttgagattttattcatttaaggggaagagttctctctattacttttcagaaatagcaaaactatgtcttatttacataattgtaaactgctcattttcttttttccattaacaggatattgctgcttaacaaagggtatgatcttaggaagaaaaaagtgagcacacactaatgagtagcaacaagcaacattggattgtttttctccttgtctttcttatcatacatcaacagatttcattttccacacgaattccttcctcataaaaatattgtcaaattttctactgtacacatggaaactagttcatgacctcaatcatttccagactcaagggctcatattacttgtagttaaagtttaaatattaggcggaaaaaactaccagttccttctaagatttattatcctactgctttttctaacataaatttgggctcactatgcagcaacaaatagtttaaggatctaaacttttgcataggtcatttcaaagctgaattgcaattataaaattttatatacttatgtcttacatcaactaacctaaatgtaacacatcagtccactgattactacctcttctgtaacatctatctatctatctatctatctatctatctatctatctatctatctatctatctatctgtgtaagacctagtgtgtgtgtgtgtgtgtgtgtgtgtgtgtgtgtatgtatgtatgtatgtatgtatgtatgtatgtatgtatgtatgtatttctaagtgtatatacatgcattacatgcctcccggaacccatggaagtcagaaaagggtaacagatcccctgggactggagtgacagaagttgtgaaccacccatgtgggtgttaagaattgaacctgggtcggatacaagtgcagtaagtgctcttaatcactgagccatctttccagcctgattattgcctctactcatatgagctaatggaacttcattttgttttaatctttacctttagctttttcttttgcagtggtaaggatctaactaacagccttatgcagctgaggtctcactgcctttgatccctaaagaactaatacctgtatttgagactacttaatgtgtttctcttggtcaagattcaacccgataaattcttttacaatatttttaacactaaaatcatattcctgtttcctgtttatggataagagtactttttgtacttttcaataaacctaccataatgtactgtatatagtcagactatgggaatattgcatggattgaacagatactgtttagtgatttcttaatcatttaagaaagaaatatgatgtgtcttgaataataaatggatacatggaaaaatccctaaaaattcacatatcatgttgatcatattgagtcataatactgtaatggtttgtaagctttttagcaacctcagaatattcaggttttctattaagcctaattatatttcatgacaaatcttgtaatattagcatattttctatattgatatgatacaagttatatctggttattagaaaaataacacaaatatgttaatatgtaacacacacattcacacacacacacacacacacacacacacacacacacacacatacaaacctttagtgattcatttcctttaggggattgtatgggtgaactctatgactgtggcacttatgaaggttagtacaattgtgacaactgacagatgacagaacaagttctaactgcaggctaccaaagcagaattccttttattcatccactgcctgtttttttaacattgtatgttctcaagtatatgtttattttttcctgttcccaaacgagcccagtcatgtttctaattatagcacacaattcctaatgccacatttacttgatattcttgtatttcatcaaccacttccaaatttacagtaaaagtgcactctattaataattcttaccaatttaaaaatattcctgtgcctttgtccattcattcagatatttggagttgagtatagtaaaggtattctctccccccttctctctcccttcctccctctcccctcatccccatttccctctctctcacaaactaactatcctcttctctctgtagaccaggctggctttgaactcagagactttcctgcctctgagaatatttgtatctagcctgccccataaacagttgattcttctactgttctctaaatatttattattttaaaacctgtaaatactatcacacctgtaagaatgtacaattccttggagcaattgaaccatcttttcctatagaacctggtatgattgggtaccagtggaagccctctctattcatcacaattaaaaaacataactgggtaaaatgacaggagcctatgggaggtgagtttaactttccagaaaagagaaagatttttaaagatacaaacatattggctagagatgttgatcagtggcatgcctaattagctagcaggtgtgaggcactgggtttgatgcctactaccacatacaaaatcagaaatataaacatgcaatgacattttacataaaagagaaaaatggaacttattaacagttttaatgaatatgagtgaacatcagtcatttttttatgttttagattttgactggaaaagctaattagaacatcaagcaagctcaatctcagaggtcagttacattaggtgttcataaaacaagatacactcatgaaatatttaaacagacaaactggaaatagtatctcaatgccaatcttttggatggaatgctaacattttctctacatgttaagattttatggttgtctgcagaaccacacttacatataacctgtataacatgatgaaacttctaaaccagtttccagacttgtttctggatttaagtataaagaagttcaaagttttgaaggaatttcagtccatgttttaagtttaatacctcacacttgattgtagggagacactgtagccccgcctcctaatagcctctacaggtgtgagggcgtggtcaggggaggtctaaggtgatgcaggaactattcttaccatcaaaattgatcaagattcgagttgaaaaagacaaccctctcggcaaggataactgacaggcatttactgaggtgtatctcatgaactaaataaaagcctcccaaaggaatagtaagtgctttgcttttatcttcacaggaaaacccacctccagaagtcaaaggacactacatgggtagatacttaaaggaaagaaggtagctataaccatcaaacaaaaggaatgtgccatgcggaaaactttacagctgtctctcaaataactctatttctcttcatttcctagtccctattcaattaaatcaacgctggatttagagttggatttggctttcctcacctaaaatccaagcatgttatttagctaaatattaaagtttctgtgttatatcaagaagccaattgatgtaatacagaatgaagaatttgagcactatcttttgtcttttcttggctctttctttcaaggcctacaccctctcataattgtcgtttatcattggtcgcctttcccagtatacatacatgtgcaagcaaacaattctctgctgacacttatgattgagtcccatacagtccatgaagacccgcctgatgacaatccctggatgctccggaaaaaaagaattgggccatacctctctgactgcactggattcaacttactccgtttcgactgacactccaactagagcctcgagtactgacttcaatcaagttgaggatttcaacctagatcttcaatcaagcaaatcccatctaacatggactggagatgaccaaatagagactttccctgtgctaacatttttttccacaggaccccaagaggctaccatcgttccatttcagtaggaagtaacttagaagatgctacgcccccgctccccattattgtttattagggtagtgtatgccgagttaggactaactttcttattgtttagagttgggaatggaaggaggtgttcaagttacacaccctttccacatgactttagggcttagctggaatagacatagttaggatgtgcaatagcagatatttcacctttatgattgttaattttggatgttttacactattaagttttaatcctcttttagactaaaaggggaattgtagggagacactgtagccccgcctcctagtagcccctacaggtgtgccgggacacgcccatgagggcgtggtcaggggagttctaaggtgacactggaacgattcctaagggaccacgcacacgtgaatagccccttctttctgtccaatctctctggcctggcttccttgctgcccctggcacgctctggcttgtgtatgggctggtgtttatctgaataaagaaattttagccttacagactacggatcatctttgagcgcatgcggcacacaataatcatcacttgatattttaaaaagctgattttaaatgatatgttcaatgattttcaaagcaatctacacaatttttgtaaaaataacacatatttatgtaatatgagttcttggatcacataatattgaactggagtaaataattttactatggaaaagaaattgcaaatggagaatttctggagactaagcacagttgagttacagtaaaccaaagtcacaaatgatgagctcagatgaacaagggtattctccaagacagtccagtagttgtacaaaaccagggtgtcctgggtgtcagtcaacaccttcagttcagtaaaagtactcattacaaggaaatgggataggagcatttgtattataaagggaagaatattgcaagtgttgtaaccttcaggaagcctttactaaggtatcaatttcaagtcttagtagacacagtgagtcaagcatttgtgagacagctacctttttaaaactaatgctttgtttaaggattaaatgccattgatgttcaagttaatgtaacactaaaaaaccctttcttcctaaatgatatgttgataatctggaaaggaacaccgagtatttcccttaaaagacatcagttttcttaggacaaatttatttcattggttaatacataccacaattcaaagaagtaaattaatacaaactatatctgtttcaacattctttcttgccagaatgaaggaaagaattagtttgttgtcacatttgcacataattagtgagaagtaggatcattagcagcagaaagaaatttattgatgggcctcattgctctcagtccataaataaaaccattttacttctaatgaccataatccacctccttaatctgacagtgctaaattacagatggatatctaatgatctccattttcccttagtttattaacacacccaaaattaaacagatatgatgtgaccagacaatagttaaaggaagatcatataatcacttcactgtctaaactgtgttaattagtaacactaacattagtaactgtaatgtaattaaaatcctttcaatactgaaaactgatgttttcagaacatctaataatcaagacaagagcaaactccaaacacatgaaataccaccatgaaaataccctagagtatgtttaggaaatggttcctactccacttgatattcaagatgtacctatccttatagcctatatttaggtttaaactaagaaacagggatagtttaccaataagctttctaattttagtagattacaccttggaaccaaaaaacacctaagttttgctatttaaattgccattgccaaagggtttccatccataattgtttgcacctacaaatgaacaactaaatttaagaaatgagagttaacttaaagtttatggttcacaaatattagtaagaaatacacttaattcagtagaattaaaaatttgtgacataatagagaatatttattaaatatcaattaacctgaatggtttagctagttagaaaatatgaagttaaaataggcacagtcagaaaggaaagaataatggcatttctactgagggagtcaatgaaaacaaagtaattatgaaaattttgttgatttgttcatcaattgaaaacatatttaaaaggaatggttatgctgatctgatctgcatttaaggacaattgtagagataatagtatattactttaaaataactctatggtgtagaatgatctaccattttatacatacagaatgaatacaggttaaacataaaacaaacaaacaaaaaactctttggtataagtacatttaaatcactgctaagctaggcatggtgtcacatgctgatagtgggcaggagggttaccatgacttgaggctatgttgtctaccaagtgagttctatgtctgtgtgacctacagtgagaccctgtcttaaacaaaatgcagtaacataatgtgaatttatgttacttaatgtgaaattatgttacataatgtgaaatcagaacttgtaaggaaaagagtaaaaagtaggttaatatttaaaaagaaaacaagctgcaaaggacactgtaatatccaggtagttctctcagaattcagttgtcacatcatagtaacattgtgttttactataaaacaagccaatgactaaaaagagattatatgatctttagactttatttaaagttatactacattacccacctcccttgccccttgctacctgtagcaagcaggggagctgtcgcagcccctcaccagctgcagcccttggaaaagtgggccttgtacctagcctgggcagcaacgtagagccaacccagttgaaaggaaggtaaagtctgggcaatctggccctgcccccatctaccatagattggcagtggtgatggagagatgccatcctccacctgcccctcactacccatggccatgaagagctggccctgagttcactagagtggaagaattgtgcctgcccttcaccagctgtagcactcaagagagtgtcctctgcatcttgccatggtgacaacacagtagacctggccctgatggtgtaggggtgggtaagctgaccctgagtgcatgaaaggaccactaccagccccaccatttgctccttgctgaactagccaggatagtactgaggagctcatcctggtggtcaggacagtggagaactggtgagctgaccaacccaacaacaacccaggcccagaaccaaggctgagtgggcccaccccaatatccaccccatctgtgacctactagagcatgtgaaggaggtggccttgcagatccgaacccgaaggatctccacaacatatggcaaaacaaagatattcaagaggagtcccattgaaggtccactattgatagtgtagcagaaatcaaaggccttgaactagaccaaagactctgtgcaatgaacatttgcaagcaaagatctatagactaaagggtttactgtgtgactcactgtttcatactagagcttccacactgagattttcctttgtttttttctctttttcccttaaattttattttattttgtgggagaggttacaagtgcatagggaggatatgacaggatgaggagatgaaacagattaaaatgcatgatgtgaaagccacaaagaataaaaaagtaaaaaaaaatactatcttatcatatttgataaaacatgtttaagagcacttcaagacatatctcatctcatatttgacatttgatctattaaaaggtagctggcatggatttctatgtattaatacagttttggtcaagatgtttgtcactcgggtgaatgtcatcctatttatgaatctagagtttgtttttcttcatcaaatactgaaacaaagaggaaactaaaagaataagcattgatgtggttgatatacttttcaaatacactgttttcttcagtgtgtataaaatgtggtttgctactgaaatgtaattaaatacttcagacactgttggaataacttcatctaaatacaaatccttggaacaaaacccaatttaattttaatctctgctaaaaaaataagcacttttagactacagagatagacatttagtttcaatcatacatgcactttagagaatcatttcattccaatctcgatagtctcagaaagggtagcgttgggtgagcaggattgtgtggtggaaccatgggaaaagttaaatacttttacttggcacaaaattttcagcaagaaatgccagtgaacaacacataaattaatcaccttacttttagacaaaaataccaaatagttacctctttgtgcaatcaaagttacctttctgtagatatattaccgaagaaccttttcttaatgaagtacatgtcagccactgtcttcacaacccttctaagatagaccttcacacggtgcaaacagtaattttaattgagctcaactggacagtttggaaaattgtctatttatttagcttgagaatcaaatatacattgcagggattataagtcattgattattttttcttagaaaaaaattaatataagaatcaacttgtagacacaaggctgaagcatacaaacctgctaattcacaatttgaaaatggtgactttcagcaaccacacatgctttgacctaatatgatattttgcttcaaccatgccatatgctaaaaacttcaaatcaactcactatgcatatcctctaaggacactttaggcactaggaatggcagtcacatttgcagtggatgcatttttagggaaaaaataagacttcagccaaggacttatttcaattaaattaggtcatttctttctttttttcaatggaaaccagaaatggaactgaagatgaaacaagcatttgctcatgattcccacaaataaagggaaaatatctgctaaatagtttttaatagtatttctcttttgatataaaaagattgtatgattaggactatttatacagatacatgtgtacacatacaaatccttatcagtaaatgtgaacttattattctttatctggaaggacaaatacagtgcactgaatgtttcttttctttgaattttagtaagttaattataccacacacatagagaatgtgttttctacagcttatacacaacataaggagaagagtggcttttttaaggaactgctggcaacagaaaaattgtatgacagcaaatgagtaaaagtttgagaccacaagccacaagtggagttttgaaacattcaagagttggcacagcttgttagtacacctacctctctgtaaccatgccaatagtaccatggagtgcctcccctcccagccaccatctgctcccacaccacctagcctgttcacacctcctcatctccattgtaccatgcccactgcagtcccacccaggtatctcattccacagtaactactatggggtggtggggagcagatggtggaacagaagtgtttaccaataaacctctatcatcaagttgttgcttttattgctcacctcgagacccaagctaagtaatgacattaaaggtcatgggtgatttctctttttactttccaaaattgatgagcactgactggattcatatttttttcaattaaacttgcatgcattccagaatctttaaaacattgcttctacttctctaggagagaggcacaaaagtaggattcagattagaactgaactccatacaacaaaagacagtcatggtaataacattttgacagaattctgggtatattgaggaaggaggaccacacatgctataagaaatgtggcttgacaataaatacaggtgtaatttcctgcttccagtgtttattctgcaaacaatctcacaatataaactgcctctttttcctaccatgaaaggaaaatagctctaagaatttactgaatcacttctatgatttttgcatgcctgttgagagacctgttttcagttttagcatgtccttgccaatcttctaagtggtctataattctcaatgatgagcattttgcagacggtaaatctaataactctgacatctataaaagatattcagttggtgagttagatgaaaaatgatggtgcagaaattgagcgtaccttgggataatgataaagccatgactatggataagcatatagcttacactcaatagtttttatattgagctgtgcttttatttcagtattattgacattcttgaagaacatgcaaaatggtgcaggaatatgtagtcatatttattcaatatatttcattgtaatcttagttgtaaattcccaagaataaaaatatacctccaagatatgatcattttgaaaatgacagaaatatcacttataagacagatcagggatatattttatatatttatttttctattaaaactttcttacgtatcatgaaagaaattgtgttaactttcttttctttatgctcctgcaaaatgaaaaaaaactaatcccaacattttacttcaaagagttaacaagaaaagtattcacatttaattttccaatgtaatgcctcacaataaaacatggtcaaataacatatgcatgtttactgctcatgatagaaagcattaagatattaaatatatcacagaggattcaactctccctattgaaataattataatgtttttcttcctgtgcttttagaaacatttgaaaatacagaaaattttttgaaggataactttgctgcttccatatatatttaccactttcattacatacttagctaatcaaacaaaggtttgataatttctctaaatacctcaggacgtctttatttggaagcagattgaaatttcttactctgattttaccacagtttattaaacagaagctacagacttaaccaaataaagatattattggaaaatccactttattttctcttatggaaagggaatatttaacttctcctatttgatcaagagattcaaggtaataaacccagtgaaacaaaatgaacattcatgcaaaattttaagtacaatttgattagttacagaaagaatgacatgaatggagaaaccccttcatcttaattcagcgtagggacagaatagcagtcttggaaaaagggagtgaacctgatagcagtgctggagtagagtcggcaggtgcatggggcagtgaaatggctatgtggcgaaaatctttgaatgatagtctaactacctgcgagtgatccccacaaccaactatggaaggagagaaccaactttggaaagttgtccttaaactaccacagcactctaccccacatacatgtccactcacaacaacaataaacacaatgcgttataagtcaaaacaagggaggggggctgggagagaagaggtaggagtaactgcagtagggatgtaatgtatgtaaagaaaaaatgaaaattacaaaaccatactattaaaaacaacagccaaaagcaatgcgattataaaactcagtaaccaaaaaacctagaaacagaagtatatttattttccttagtgtagcagatgaacttccaaatcatgggttcaagaaccatgtagtatgtggaggttgtactgtggtgaataattcatctcttctgtgtggttagaggaaaaggggcaacttgaaacaaaatgaaaaaaaaatcctatagttttcatcagtatttaccctctgtattgataagtataagagtggcatggaaaaggtgatgatggtaggtataatatataacttggaaactttgcaccaaatacatttttgaatcctgttcttacttccttggatgttgatctataccatagtagattttcaggctaaagtggtactgttatcactattagtattttagacagagtttggctatatgacccaggctagcttggaactcactatgtagacaatgttgaacccaaactactcatcctccttcctcagtctcttaaatgatggaatttctggcctgttccacctaacctgatataatattataaaataacttcaatatcacaaaactctttgtatcatgtgtgagtgctttatgttacatgtggcagacatttctgttccatatatattcttccttccaaaatatatattctaatagttgagcaagtaatcacataggtaagaaaaatcttgagtgccctaataaaatgcttaaggaaaaaaaatatcattgggctcctgaaggttagacaacactgccccaggtgggcatcattggcaatagtatgtattttgctctgacctgtaattttcctaccatgatcacacatattgcagtctgattgttagttcttatttatccctgcattctcttaacatttattggtttattcagaaaatatgagctaatcagtttatctataatccataagacaatcctttgtatgaatgtatgaagacatttctctctctctctctctctctctctctctctctctnnnnnnnnnnnnnnnnnnnnnnnnnnnnnnnnnnngtttttcgagacagggtttctctgtgtagctttggagcctatcctggcactcgctctggagaccaggctggcctcgaactcacagagccgcctgcctctgcctcctgagtgctgggattaaaggcgtgcgccaccaacgcccagcaagaagacatatctttaacaaaggcaaaatcattctaaaagatgtttgctacatgtgaaccatgtactataggctctcagtattagtacttcaacaacaaaattccatgctaagaaacactttatgtaatatctctcaaatacatatgctagttcatgggttgatgtggctactaatctgaaatactttcagcagatgttgagcatcgtgtattaagtttatatcacaaccaaaaagagctcatttgctccaggaagaagaggaagtagtttgacttagacctcaggatttgactgctgaaattactggaccaatttcatgcttgtatgtttacagggaaaaaaaggccttagagtatgcaaactattcactacttgctccttactaacaacagtctatgtgtcttacacaagtacacaaaagcatatgttttacacacacacacacacacacacacacacacacacacacacacactttctgccatgcacttcagcttaaattggagtacataccattaaatctttttaaacttgaagataacttaaactgaaaatgtatttcaagtatttcatctattaaacaccccttagctttaaaacaaagaaaatatcatatagtttgttactacattacttgggtgactaggaactgtagctctctcctgctgcccagtattgagggacatcatgccacataatgttactagaggaaaagatcaatattgaaattagaagtataatttctattaaatggatactgcttttacattatctgatttatagtggcttgactgtgacaattttaaagtaaaaaagttttaagacttttacatgccaggaacacaatataggtaaacatattatttattttccacaatggaaatgcaattaatttaggcagcaaaagatagccactgattaatatgacaatagaagccaatcacccaaaatttattagatggattttaatataaaatacaggagttcacaaaccactgagtggtcccttatcaatacaatctaattggccaaaggacatttcaaggcctattgggtaaatgacagaagattcaaaagaggaattattttgttagccttcatgttccatgtaggcagggctaatggttagcagagaacttcagagtcattccacttttccacagacagtgatatgattcacttctcagagctatctcttgattagaactagaatttaagagtttttgaagcaacaagatcctatttcactcttagtatacatgaatgattcatatcacagttaataacagaattactgcatgactagggaagaaaaatctccatgtgaaataatgatgacccaactagtaaaaggcctctaaatcaataagctgctaagactcaatgagacagaatcccatgatattcacaaaaatcatattagaaagatcctaagaggaagacaagaagtccaatgtctctgaagaggagacagatttgatgaggtcattgtatttccttcaaaaaaccaaataaaatctaaacctacttatggagattgcacactacatataaatgaaataccataggacttattttcttaaacacataaatgtcttcttacatgagactaaaccatatgcattacttttattactgccatttcgcaaattgaccaagccaaacatttcttatctacattgtacttaatactacagtgacaatcccaactaattcaaagaagaagaagaagaagaagaagaagaagaagaagaagaagaagaagaagaagaagaacagcagcagcagcagcagcaacaacaagaacaagaagaagaagaacaacaagaagaagaacaacaagaagaagaaacagaccaatattgctaatttatggtaaacattttaaattttcagattctttttatcatgtatcctagggtaacctcaaattctctccgcttgtagagaatgaccatgaatttgtcatctttgtgctttctcctaccaagtgctagaattataggaaggagtcactaggcagtttctgtgattctggggatcaaactcaccagagtttcttgtatttgagtcaaacaatttatttatcaaaggatttatgactacaggcaggaaacatatttaaagaatgaaatttctagaaaatctaatatgaagcccttttaatgcatgggtgtgtgtgtgcatgcagtgcacctggaactcatagtcttggacaattaagtacagtctccatcactgagctatatcccagtctaaaacaccacagtctttcacaatagcctaacatacacacaaaaagaaaataatctttgttgctgttttcagtgaaaacataatactgaaattctacaattaacgtatatggtagtttaaattgaagactggccataaggttatggggtacacagacttgcttctatgctcgcacaatctagtgttagattctcttacaactacatttttaattccctacctttacatgccttactttttattaggaaattattccaaaatcaagaccataaccatatactcaagccaaggatgtagctcagtggtagagcatcaaacaataacaacagcaaattaaacaaaacaacaaacctatataaaataaaacaaaacaagctaaaaaaaaatgagaaactcacagctgggtaaagcttccatagacctcactatgccaagtttatttctgcaatcattgtactccatagtactgtaagaagtggcatgaattataccacatagtaatttatatccttatagatctgttttccttactatgttgaggggttctggatgataagtacgacatgacatttctctttgtatcttcaaaaaaatcaagcatataatagatgtttaataagtactcattcaatgaattagtacaaatgaaaaatgcaatcactaaaacaaaatgattctctataataaatcaagaacatatttacattgttcctaaaatcattcagcctctactaacattaaaatagttacaagttattggaaacacttggaaaagatgaatataaatatttgctgctttggttcccctgataaaggcaaccaaattacaaaatataatatgtaacagtatttaagaaccttaggtaagcaatagcaattagaaaggtggtgaaagaactggcttagatgtcagccttgatgatattaatataaagtgtcatacagtatggctatattaaacatttcaatgaacaagtttctttatcttgaatacacatgaaagtagaagaattcttaagagattctggtgagaagcatgaaaaggagaaaaggaagtggtatttgaatgatattggccatacatgtgaatgattggctcacatttggtggagatatttgggaatgaggaggaggtgtggctctgtgggaggagctatgtcattgaggggtgagctttgaagttttgaaaacccaaatcattccaattccctctcccctctccattcttcctcaattccccttgcctctttctcaccctctctgtcacgctcctccctctctccctcattccctctcttcctctcttgttttctctgcctcctgtatgttgtctcaaaatgccagctcttggttattactctagagtcatgcttgcttgccctctctcatgccataactctcatggtagtcatggactcaccctctgagtctgtaagcaagtcccccgccaaatttttctacgggttgccttggtcttagtcatggtcctttgtcaacacagtagaaatgtaactaagacatagactttatttaaactacttgtttttacttgttttgattagctggaatcaaaatttgatcaatgttttcactgaaagacaagaactatgcttattattttcttattttaacagatcttcatctcatctagtctcatagtaattaccctcaggttgccttgttaaagttcatatggtatgtaaaaaaaaaaaacaaaacaaattcaacctcttttttccataatgacagtatttatatacagaacagacattgacttttattaaaatgtcacatacattacatactgaaaaataattcaaattgctaccattcaaaacattataattgctatatatttcaactattttgtagcatatcacaaatcaaaatgtaacaatggttacagaatggtgaagaaactcaaatctgctcttcaagttcttaaacaatgaattatttatttattgttattttttaaaatagcattttatgtagcccaggttggccttcaacttctgagttacctcttcccatcacagaagtcctagaattctagacatacgctaccatacagtctttgcttggaattctttttgagaaagggccttcctatgttgctaaggcttgtctcaacttgatattcttctgccttactcttctatctagtaggattacagcagtatcacaatcctaggactcgggaggcagaggcaggcagatctctgtgagttcgagaccagcctggtcaacaagatctagttctgggacaacctccaaagccacagagaaaccatgtctcgaaacaccccccccccccaagattatataatgttgataaaatatgtatgctcttattcaatttaagaaagaactatgaagatcatcttattttattttagcaatagttccaattttttaccattattttaccataaactaattaatgctgtaagtagttattctcagaggaagacctcaaagtcagatataaaactacaatatgtcagttatcctaactcctaacaagacttccagcttttataattgtcaactgaaaaaatctaagaactatattattgaatgtcatgaggttaatttttatgtgttttatgtacacaagaaaaaatagtcgcttgattaaggctagctaaaatttgacagaatagatatctaaactagaaaaattgaaaatattgcattcatatccatgcagctgatgatataaccaaacccacaaaccacaggctatctagataattttcttaaatagtctatgaaatggagagtcaaaaatcacaactcacttagctaaaatgcttcaaaacacactaaagtgatagagtttacatggtctttgaataattgtctcactgcacacttggaatcccgacagttctgaacatatactcctaaggataatgctattcagcagagtttgttcaaatggcattttatgtgtggaaagtatttttttatgcagaacacaaaatagtggaggttatacagtgatatcctttaacaatattaataatggactgcaataaccaaactaagatttttcatcccattgacaggaagaacttcaagatgttattaaataaatgttggaatggctctatgtgttcttcttttctgattccacacaaggagactgactggtaattaagtcatatgtccctttttataattaggtaaatgttattattgttttcctttaggctatatttaccctttatatatattaaagcactatgccttaacctatatactagagagctaagggagtgtagcaagtgacatgcctcaaacacattataagcaaccatgcacaacatactaggtggcatcactgatttatgaaacattaacaatgtggagcagcattctaatatgctgtgcaatgacagacaaggtaaaggaacagagatcttcagattctgaaatgaggtggtatatggcaaggatgggaaggcacggggaataaaatattgactgtgcactgtggcagtggtaaagtggatgaattagtccaaaacaatcactcgtcaactaatggtgctaaactctcaagaaagtatcgaaaaattgttctcagtggtgtgcataatcttaagtctttaatggttgttcacaaagtactttctgttggtttaacagaaggattaattagccttttttattttgtacaccatatacatttagaatttcattttgtatgcatttatacattgtatgcttttagaattttaatgtccattagatgctttctcttctttgaaaggcagatcattcagcagctctggtaaggcagcatgactaattagccttttttctctacttcccacatataccaacttaagactatgtcctgtccttgattctacagccaaattataactacaggtattaaaagttacattgttttgtggaccaactacttacattatgtaagaaaaataactactgggatatatattttaacaaaactgatacccatacaattggctcatttgaaatactttacaagtgggtgttctcatattctgtaattaagttttcactgaaagacaagaactatgcttattattttcttattttaacagatcttcatctcatctgtcacaccacatactgttcgtctgtacattcatacttcacattgatgtactttatgtgtgatttaatctctctatcccaagggcctattttagcaaaaacaatatttcaatttgtcaaagacaaagtgcactgtgcattgatttcactgtcatgtccatttcctttgccaagagggacggaacaaaattttaagatacgagtgcttcataacaagtctagcccaaagtagctcatggcctcatcagagtttaatgagacattcgatctaagaaataaattaaatgacattttgggatcatgcttaatgaagcaggtatatacagaagctctgcattgcaatagtgctcttagaatctgtggagaatagggcaggagaatgtcatcaatcatttggtacaaaatggcactctgtggaatagaaattgttgaacctcactagctcctggtctcaatcatgccccagaactagtttcttgttatgttagtgccataaaacagtctccacatgcctacgttaattccataagtcagtgtctcatcattgtcacaagcctcgaagaaacatagtatttgtgactttagagttaaacaaaagaaaggaaaataattttggaaaaaacaaagtagaaattgagtttaagaaagaagttttcttataagagaaattaaaaacttctgttaaaatcattaaaaagtaagaagaaatgctcttaataactaaaacagtggacatacaacagcttttataaacatctaaactcaattagctaatatgatttcaagtctataattatgtcactaaaaattaaatcatattcttattttcaaatacaaatttttcaaaacactgtcatagttcgtcacaaggttgtttgataatcacaatcttttaactatcattaaaataaataaaatgagtaaacattgattaaaaacaattcacataaataaaaagcatagaatgtgatctcaatcaggaaatggacagaggacatagggtgatgattttcaaatgaataaagttaattcaaagaaaagaatggtaaaatgcctctcataaatactaacaagaatttcagttacaaaatgagactatttattggcacaagtttcgatgtctacttgaaaaccaaaactttcccattgagtttatgtgtttgtttttacagccagctatgtttaaaagcctgagtaacataaacaaaacagatcaaagtaatgcttatgaggctttattgaaactcatacttcattcttgaggattgtgtatgtggatgaaatcttcccagaaaacgtgtttgagctctagaaaataaaaattgttccttttatttctcccccaaaatatacagtttcagaaaataagtatttttccattaaatttctgtagaagttttgttgaccattcccgtttggcaaaagtagctaacaagagaaaagcagctcttatccgagagtagctaataaactagttagttctaccctaaccttacaacggactgagaccaattaaaaaaataaaatgctattctgaagtaaaatttgttgttacaactgggattgcagaacagcttgattccttaagagtaaatctgccttcaggcaggtgaatatataatcataggaataatggttttctatgttgttcccgagttcaactaagaaaccaaggcagggactatgcgatatttcctattatatgcatatcacataggacactgttggtctcaagagtgatttttggatgcatggatggatgaatgggtggacagatataaagaatattgataaagaaaaatactagaaccttttcctttatatgatggttcaccttttcttttaccaataaaataggaatttccataggaaaattatcagtacatacatatagcttagtagctctcatatataactggttaatgatacttaaattttgtacattatgagatatgtggcagatgataaataaacatatcacttcaaatttatttatgagaaacaatgggatcaaacgttgactctgacaatactaccttcactattttgagtttgttacttagctccttggtgtctcagtatgtcagatcataaaatgggctaatgttggcttttatatactaaggttttagaaggattaaataaatcaatccattaaagtgataacaacagtatgtagtatattctgaactcaacaaatgacagatgttggtatgaatagcagcatttgttatgagtattgttacaactttcccatagatcatcttctttcttcctcctcctcctcctccttctcctcctcctcctcctccttcttcttcttttttttttttttggtttttcgagacagggtttctctgtgtagctttggagcctatcctggcactcgctctggaaaccagactggcctcaaactaacagagatccgccagcctctgcctcccgagtgctgggattaaaggcgtcgccaccaacgctgggccccatagatattcttaataaatgtttacaaatcctttctgaataagaaggttttaacctattattttttaccattgtgtttaaaatgctaaagcatcacagttgaacactgttgtattgtatttatgcaacaagactgatgaaatttctaatacactgactgataaagtattatcattctaattaagtaagtaggcaggaattcaatttagacattaattttgacaaaaatactaataaagacactgctagcatattgaaggactggttaggagcagtggttaaaattcattaagataacagtaggtttcattaatggtctaagacattggccatgaaaacatcaggaaggagcagtgagacatgattaaaaggtaactacaatatatggggactaggctgagagaaatacaaatagaaaaaaatctattgcacatttggagaacataggcaagcaaccactactaaaaacactgatagtcaaagagcatgaaaataattctgccagattctcgcatttctggcaaggatgtcatatattcctgagtgggcataacacatagtatttttaaaagcattacctgacctttgataggataaacttttttgatatttttattaaatgtaatcccccacagttactaatttttaaatagatatttagcgtaatatgaaaagacctttaaaaggatcaaatgttaaatctatatggttaaacatcaatcaccatttgaatagatatgaagatatatacacattatgaactggcaaactaattaaatgaattatatatgtctttacacagtatattttatatatgaggtaggtatttcaatgtttttgtctacaagagaccttataacccaggcatctattttccttagtaaaattcctgaatatgaaatagaattctgaggatgccatattaaagccgatgcaatatgttacatagggtcctgtttataagggcatatttccagaagtaacctggaatacataacagatcatcagttaagagcactgcctgttccaacaaaaaaaagtccagggcaagatggtttcagcgaagaattctaccagaaattcaaagaagagctaatagcaatattcttcaaattgttccacacaacagaagtaagaggatcactgccaaactctttttatgaggctacaattaccttggtgcccaaaccacacaaagacacaaataaaatagagaaatacagacctatttccctcatgaacattgatgtaaaaatactcaataaaacactggcaattcaaaaccaagaacacatcagaaagatcatccaccatgatcaagtaggcttcatcccaggaatgcagggatggttcaacatacaaaaatccatcaatgtataatccaccatataaacaaactgaaaaacaaaaagcacatgatcatctcactagatgctgaaaaagcctgtgacaagattcaacagcccttcatgataaaggtcttggagagatcggggataacaggaacatacctaaacatagtaaagcagtatacagcaagccagcagcaaacatcaaactaaatggagagcaactcaaaacgattcccctaaaatcaggaacaagtcaaagcgttccacgttccactttctccatacctcttcaatattgtccttgaagttcttgctacagcaaaaagacaacaaaaggagatcaaggagatacaaattggaaaggaagaagtcaaactttcattgtttgcagatgatatgatagtttacataagtgacccaaagaattctaccagggaactcatacagctgataaacaccttcaggaaaagtggcaggatacaagattaactccaaaaaaatttagtagccctaccatatatagacaataaatttgctgataaagacatcagagaaacattaccctttacagtagacacaaacaacataaaatatcttggggtaactctaaccaaacaggtgaagtacctgtatgacaagaattttgagttattataaaagaaattaaagaagatatcagaaaatggaaaagagcactgcctgctcttccaaagagtcctggcttgattcccagcacccacatggcaacttgcaacaattgtaacaccaatcttgggggatccaaagccctcttctggcttctgagggcacctggtgcacatctagtacacagacctacatgcaggcaaaacacacatacatataaaattttaaaaatgaaaatcaagaaaatccatacatttagatttcttcatggatgacaaagctttcaaataattcaacaatgtgaaaattaatgtactgtccatagacattaacatgaaagtgaaaatattaagttgttgtaaaaccccaagagccaaaacattaagggatataaagatacaaagaagaaaggaagaaaggaagaaataaagaaaggaaggaaggaaagaaggaagaaagaaaggaaaagaaaagaaaagaaaagaaaagaaaagaaaagcaaggcatgcattatctcaaaaaagagataagctacatgctgaacagaggaattatccctcaaccaaactttctataaatgcttgttgagggacttacatgcatagataaatgcatacccatacacatacgtgtgtgtgtgtgtgtgtgtgtgtgtgtgtgtgtgtgtgtgtgtgtgtgtgtgtgttgtgtatattgctcacacatataaaataaaataaacccataataaagcaatggttatttttctaaggaatcctcattcaacaagacttatggatgtctttttatgatgtatggattcttgtaaaaatagcagtaacaaaaatggtgattgctgggcatagtggtgcacaccattaaacccaacacttgggtgacagcagcagctggatttctgtgagttggaggcaagcttgatcaacagagcaatttctaggatagccagagctgttacacagagaaacccagattttcagtaagcaatttatagtaatcaattaacaggccctataacaagcttataagttaagaactgttatcccattttataggaaaaacattgaggcaccaaggagctaagttgtacagatgtgtatatgtgtgtcattatatagaagcttctattaagcatattcattctcagaaccatatcggttcattatttagcttgaggatggcttcatattttacagagatcatgaaatagtataataaactaactcaaaattgacttcagcatgaaacatattttaagattatacattattttctccataccctcccaagacacctaatcttgttaatgcttctacacccactcctcacctttcttcacataaggccaaaattctcacaccactctaaaatctacttctccttcctaacagaatataatgttgttaaaggatgaggggctgctttactgtcaggaatggaaatattaaatgattgtgtttgtaaatccctgtaattggacaataacatagtatcacactgctgaaagtatcacacacataggtaatgttaaatatattcgagtaaacatatcagttactgtttatcctgtaatcagcatgatactaaccaataaacaccacatagtaggtgtggaccactagcttaaagcattcagaatttcaacacataaaagattcaaagaaacagtgtgtttaagggcttctgatagtttattaagatcatagtgatattttagtatggaacaattttattactgttactacaaatatacaaagcacaagttaaaatatactcatgtctacatatgcatccaaattaaatgagttttagttttgtccatttcaaaaattcttatggaaaaggttttctttgagaattcataatattatgaaacattagcttaaagggatggattaaggcataatattctacatctatgtgtatatatatacatatatacatatgcatatacatctacagatatgtagataaggatgtttacaatacttctttcacataattctagagtcactcaatctagtcagtattttttaactgcaagctgtgcttctcaacattcatgacatgtaacagaatcattcattcttcttgtcttttgaaagaaacaaatggctttcggctgactctcatgaatctgacagtctttctgtctgagtcccataaagctgtctaagtgatacaaacataactggtttgcttcagaatattgagtagctattttctcccatttattcaactgtaaatacacaggcttgggaatgttgaaaagaatctggtcaaatgacattagcaaatagtctagctttggactcccaacttggatgcggtcaagaaaaaccatgaaacgagtgacctgtacttcctaaacttaaccttgcacaagaaaaagctcggtaatgattcttacatagaaggcactaattctgtaatgatacatatgaatgctcacatctacatttaaagtactgatatggctcttttcctatgacaaaattctctttgaataaagtaggttaactacattttctatgcatgaaatcagttggtagttgcatgaaggaagttcacatgaaaagctatattctgtccttatatgagataaatgatcattcaactttatctacaccttagatcactctagttagaaaggcttttctaatatatgtaaactaattacatgtatttggtgaggaagaaaaattgaggaaatacattttaaaagtgtaattgaagcaggagaattaaacagaaggcttcttgtttggcaatggcccatctgttctactcactatgcttttattgtaagtctatatcctctcatttaccaaatgaaaaaggtttacctaattcataagtagtaagcaaggtggcatttacaatttgatgtgatctcagtcatttggaagttgcaccttatatatgtagaaatatacagacatatagaaagaaatcataaattagaaaatataccttctactgccatatgcattacataacctgaaaagattttctcatcctgatgcaatctaccagtttgtctcagtaaagcaatgaaatatgaaattaatttattaccatccatgcatgtttccatatttttcaaatgaataacatgtcaccatgtactactagcctcgtctgtagtcttaacatataattcaagttttaagtaactacagtacccattcactcttatttaaaagccatttaaaggtcttgtttaaagacttccactggatgtcagaaattttgggcattgatgaattctataaataaatcatatttatattacatataaaagattaagtttcatttatagataatgtccaaaacatatttacaacaaaaatgaaatagaaattatctttaataaaatgatatttctcaaaataattcttgtactatattagaccctttttaattatataaagcatatacaatatgataaagagaatgatgtgggcattgtgatgatatagatattatgcttctaaagacttgttgaataaaggcagttcaaccctgctacagatagttgcaagaacccaggaaatgacaggcagacataaaactactaaatgagtcattggagagtaacatatatagcatgcctatgctggaaacactcatgtactaggcaggctgaggtaagacaatatcatatttcatgacactactcagaatataatgaaatttaaaccttaagaatgttattgtctgtgatttttcagtatttttagaagttttgacctcaggtaggagaaatcaagaaaagcaaaatcaaggatgagggatgactactttatacagtggtatgtatcccaatttttacatcttaatcttgaaacacattgatgacagaggttaggttgaacatgttttctttttcctgtaacaaatttccaatactagctcataattgaagcatttcaggttatttctttcttgatatttctaccacttctctgtttattaacatttgatgacaaatcccttgttattggttttgtgaatttcataccactagaacaatatcttctttccacaaatttcagttagcatctgatgataccctaatgcctacaatcttccactatatcctgctcagcttcagaaaagatacaatagcagtcacatagaaccgaatgaaggcacacaaaatacaatgaaaatgctctccttttattgttcttttttctgggtgctgcaatataacaaaactacagaaataaacacaaacaaacttttctatgtttatggctgtaattccaattttgagttttggaactaggaataagatctgtcacaacatattttaggtgactaacatttttgaagatacaagttgaatttttcatattttgtatactgtatctaaaaactgaatgctggtagaatttaggcaaaaagagccccaatatttctttcatactttgttgtaaaacaatgcatcaactcaaacaattaatgttttatttacatatgacatctttatagatacagaaataactttatgtctgaatgtgaaatcatactagatattgctccatgcatgtcaagatcttttggtataatagaatatatttgcttcctttctgtttcattaatactaactaatatttcaacaagaatatatatatcaggattgggcatgttggctcaggcacttaatcctagcactttcagggaagaaagtgacagatggatctctgtgagttcaaggtaagcctggtaggcacagagagttccataacatccatgcctacatactgagacctggtctcaaaaatgcgacatcaagctagccaagcacacataatgctttgggggtttgctgttttatatgtcagaaatcagcatagtacactggtgctggttgccatttgtttttctaaactttcctgttgagtaagtctaacccttctccactattagacaatagtcaacctgtttcattttctctttttattgattccttttattaacttctatattttgaatcaatatgaaattcattatagtgtatggtgtgaggttggggcataacttcccaatcaaattatttcaagtaatctagcctcaaggaaggagtttatataaagtccaggatgcaattttggcagatctaaaattaaacccagctttccaagtctgaatgaggtttcgttcttttgctgacataattaatatgcccttgtatcatgttaagctataaaatggttcatttaatcacacttaattgaatttatgattttatacttaattcagttttaaatcctgtaacaatactatttattctatcctctcccctctcatcacagtgtttgaggtagcttatcctacttagcaggtggaaacacttaaattaattcaacaacttgaaaatattctaggaaattaaaatgggaatgagatactaaacatagtatcactattagacagggaagagagaacacaattgaagaaataatatgcaatgatcggcatcagcatggcgctaggatatgaaacgtaagtaagacttattgtcattagacttcagattgtaaagtctcacattgataacttgcaggtttattaattgagcatgtttagttttaatatgtaagatgtttgaagtagagttgctaaaggttacatcatccaaaatgctaaataaagagaacaaacattgcatcacaatgttactgggaaaataaagtgtgacaatgtatgcaaagctatgttaaaaacagtatataaactaatgtttttttatatattacgtaaatataaaatgttgtgaaaatatgaactccatgaattagaaccatcatatatggatcaaaattttccatttgcttgatactttattattaacagagaaaataaacttagcaggcagttctttgtataagataataatttatcaggatgttaaaattctgcttgataaacagcacagttaaatatatgaatgtaaattgtaattaaatgcattataccagtacctattccatccatcttgtcagtataaacttcaccagaaaatgaaagaactgcctaacaccaggaggcagccaaagagaaggcaatcagtggctttattaaatgacgccaacagggagatgactcaggcttagtgcaggggcaatgaaaaggccttaaatttttgagcagacaaatgtacctttaattcagtttaataaaataagagacaaatcaataattaaaaggtacttgacaaactaatttaactgcatgatgagggtaatcaagagcagcattttggaatatcaaaatgtaggaagtgaatttaatgaaagaagaaacatcaacaaagctaaggggaatttaaaaatagaaatatggtatttaggaagaatatcatgcaattttctgcttcattcaaggctctggaccaggaatatgaatggagagttgaagtttccattttatgactgaagatttctctgtagtgactcttttgataactttttatgacttctctatgctttaattttctcagctatttaatggaacattaagctggcccacttgtttaaaaaactcagaattttataaaaattgtgaatgaaataaaaaaaatgaacaggggtccccagtttctacactatcaaattaagatattttttcgaataaaattaatatttctatcaccattatcacacaaaagaggggtatcttacagcaaaactcaaatgtcagaataaaggaacaattatttaaatgtggtatgtttctaaatttatttagcttaattttttatgaattttccaagatacccattaattaccaacaaattaaggctttacagaatgatactagatcctgggtcatgttttaaaacatttggagtcttgggaccctctaggtctccagatctatggatcaactttttttttcaggatactatcttttcctcccaagacagggtttctttgtatgtaactttggaagctgtcatggaacttgctcagtagcccaggcagacctcgaaatcacagagatccacctgtctctgcctcccaagtgctggattaaaggcatgtgtcaccactggccagcctggatactatcttattatgtaaaatatttataaagagtatgaactaagatgtaagcattaagcattaggtattgaaagaaggagacttcctctttgtaaatgactaattccatataagttttttgatatgattaatgtacaattttttcataatttcagtgctgattatcaaaactcataatggtatctccagccactttcttctccttttcagcaattttattagaaactgatactatataaataaaaagatgagaggtcttatcatagaagacttcttagttccacatatagcaatgtaattaatgtataatactaaaccaaacaaaaccatagttatatattgagcaactcttttgtactactgggaatagggtaccttcccagactatactctttaatcctgtttccttgtgaagatgcaaaaactaacagaatctatcctactctaaagttaaaaggaaaaacagtattccaattgctatgaaggcaaaagtctaacacatgtgtattttttttattttatatatggttatttagatccacagaacatcagaaggtcaccatacagtgaactggcggtaaggtggggaagtaagagggctttatgggctccacaccaagaagtttcctttttgctttcagataatggaggtcaggtgaggactgctacactgtcatcttatagaatccagctcactcacaagccagtgttcttcatttccaccctcatggtagtggagcaccacaggtgtgtagtcccagtatacctcatctttctggtatggctgtcatttttctgatgtagtatttatgcataagtttgtattatatatatgtatatatatatatatatattcataaacattatacaaaataaagtttacattatagtggttgtatattaagaaaacatgtgttataattcccaaatgctcaattcaaataaagggaagttgagagaaaaccttcaaaactttatgattcttttccaattagtattatgacaattccttgccacagaaaattatacgtctactatgctgacaacctataacactctaacgaaaaacttgaattatataagtgatgggcattctggaggcaggagcaatgcacagacagaaataatggtggtagaaatgccatgaatgaacagcaaatttggtgaaaagctgaagataccaaggaagtaactagaatcgaaagaaggaattctaggtctgttaatacttccttgttatttaacaacactggatgtttgttattgagcctaaatattaatacatatggcacaccatttaacaagccacacaaaagtgtccagagtttgaacaggcaatcttactgaacatgtgttgacaatggccgcctctgctcttgccctaagaaacctgcaatcatcaaaactgcctagttaagcatctctctaaggccttgtcctacagaggcaggtaacttgtactgaatgaatgtgagatttaaaggttacatgttctcacaataaattccactagatttttgttttctttgtcttttcgagtaggttcagaaaaaatgttttagttacattttcttaatcaacttaaggatattatacattttaggctgtcaatatgtaatgaacaaaatgaccttatacacagtaattgaaatagaaacttttcattagtgtttatagtgttcaattccatagcacatgtgctaaaataaaactagaatgtcaaaaagaaggctaatatgctctctgtgaaatgatgatagaaattctagcaatgccccagattttaacattatgcaatatataccactactgaaagactgtcaagtaagatatattacaaaatgtaacaattattctctaattattttgagaaaacatggtttataattaattacacatattcttgagatacattggagatatacaatctttcttactgtcttctatatcctattggtagaaaacattgaattatcagtgttattgattaacctgggctcctattttgccttgtgtggccaaaatgtcatttggcatcccctttccaacagtcaagataatatcttcaatcttaagctgttcatacacctgaattatttgccaactttttatattttacaattttgtgtgcccttttctcctcattttaggttgcttgtcatagtgaaggaaaaaaaatcatgtcaaatctctaggtattttataccattctttgtaaaaactaaagctttccactggcaccctgtccacacgtactcatttatggcaatacaattcaaaattggagttgttagagaatgtaaatgatggtggcaatcaccaagcaaaaaattttaaacgcaaaacttataaacagagggaatgcttcccatgttgcatgatgaggcataaatgtgcttctatttccataataaaatgttttgaaattatttttaaagtatgcacatatgactgtaattaaaatgctctgtagcattgtaaatccaaagtaatttagagaataaccttcattgcttttactggaaaactaacatctgtctgttattaaagttatgcagagcaaagaactcaattaatttcattccagtgctggttaaactatgtactcattattgaacactatgatgttaaaatcaattaaaatagtataacaaacttccagtaatttttctacaactcagtttatgtaatttcccttccactttcatccacaaagctattagttaaacagaaagatgaaaaataaaactctaagtttcttacacaattattcagattaaagaccattgattctgcttctgctgctgctgtttatgttatgcaagctcttcaaatccacacctaatttgctccctggctactgcagaaggtttccaatagccatgttatcccccaatttgatgtcctggtagtagcctgtacttttcaacttgattgtggaagttgagggacttgtttaactccctaatattctgaaaatacattcttttctaggctctaaaacaacacctgtttcttttagtctccttttcttttaagactaactttgcaaattctattaaactaaaatctacatacagtcattattcacattgtatgaaaaaattaagaagcaatggggattatgctaaactttggggtagcccaacttaactgctatgtttctgtatacgccccccccccgtgtgtgtgtgtgtgtgtgtgtgtgtgtgtgtgtgtgctttctgtgaatattcatctatactttgtcttacaagggtggattatgtttcttgacaatagcactgtagttcttcacagatggccatcaccatccagaaatggagatggattacatagccttagctgctttttgttgtttccccttttgttatgtagagaaccagtgtctcaatgtggaaaaacagatacatcaacactactgcatagttactaggtgttataacaaaagacatactacatttttgtttgaaaataaaaacaaaaggagcaagactttttagttgatcacagaaccagcatcggcttccttctccataaaagctaaaagtcagtcagagattaaataggaggagaaattctaagagataagaacaagagcaacatcttgcataagggaataattaagtgaaggttgataaaaatgacacctatgtactgtaaaaaaaaaagtactatgaatcaatgaaaagaaaaagtatctgaaaatcacatgcaatggctattgattgttagattgataataatccagggggagatttattctctgagtcatatggaatttttcttcttgtaattttcaacatatttgtaactaagaagctctttgacagtatacttgttaagtctgcaaatgattcaacacccaaagagattgctaatatgctttttgacagaatcagatttgaaattttgtagcaggtagtttggtaaactttaatcaatcaaaattacatttaataaggataaacacaaatattaatgttttttcctaaaaatgaattacattggcctaggatttgttacaaaccaacttgtgtaccatttatgttgaaaaataaaaacaaacgagataaagcttttagttaaccacagagctagcatgtacatccatagagataacattactagaaaagctaagacattatagccagtcatggattatatagaacagggaatgaaaataggagcaactaccattctggatggaataatcaagaaggaaaactgcacatatgtattgtgaagatgtaccatgaaaatatggacaaaacaaaaagatcttcaaatatttgcgtaactactgtgaaaagtggggcatctcagatcctgtattgtccccacatggacctgagaacttacaagataacagatctatgtattagtaaggatgacgtatttctagtgagagaagctcaggcactcataaaggaaggacttccatgttactgccgcctcagtaccaaagggagattaaattggatgatcctctcaagtctctttcaacaaataagattacgtgtttctatgaaatagtaatccaagtcatagaacaaccaccaattcaatatttcctaccattttccattctgttatttattcttaatgtctgtttggatggtaaataatcaaaattccctactgtcctaatattataaaatataatttgaagtttacttgataatcatgattggactcactgagacaaatttgtctgtatctttgcatgtttgtaaaatggctagttgaatttaggatttcagtttatgataagagactagccatttcctcataaggagttagggaacaaaactcacatcagtagattgagctaaatagctacacgttatactgcatagccccttccctcacaatagtattgtgatttggatatagacatctatttgtggatgtatatgagtgtatatgtaccgtaccggtatacatatatacacacatatatatgatatcacaataaaggtgaagtaaaacaatagtgaggtaacagcaaaaccatttgaaatagaacacgttttggaatattggcaagcttttggcaggatttcaagtgagaatttacacttgtttgtcaacaaaaggaaaaattcaagaagaacagaaaaaaaagaaagaaaagttcatggctttagtgacaaaaattcaatagaaaaagtagaaatagccaggtagtggtggcaaatgcctttaatcccagcactcgggaggaggaggcaggcagatctctgtgagttcgagaccagcctggtctataagagctagttcaaggacagcctgcaaagccacagagaaaccctgtcttgaaacacccccccaaaaaaagaaagaaagaaaaagtagaaatagaaaaaaagcatggaaataggatataatacaacatagcattttttcataataatcattgttataaaatgttggataagtcaaacatctagaaatagacattttcatctggtatgggggtatactactacaaatcaacagaaggtcagtcagaagttaattctgcgtttgaaaattatgtcttgctgctcattggtatctgatgattagtacattcagttctctatctgacagcctacaaaatacaaataatatccattttcttcatccttttttcttgttcatgcagcacatatttatcttaatgagtacatggatttttaaatgatagctgtaaaacaaaatagcaccatttgcatttcagagtaatcagtaatatccagcttgaattttgtccagaacagaaatggcgctaaagagaatctgtctcttgctgatcagttcaaaatctgaaattgcagctttaaaagtctgcttaaaatgattattaaaaatgcttcttgcattagatgctaaaatggcagaaagacctggtttaatagcatgaaggcaaaaataaacaaagttagcttttggaaagactgcagaccacaggactttattctctgatcacttgggacttgctcaactccctacaatcagatactaggatttcccagcctactgaaactcttctggtagctccagctatgtgacctaagccagtaactccttttttcttacttgaaatttcttttctttgtgttcttttttctgttcttccttccttaaactctttgatctaatgatctcattcaatcctatcaacctaattattccatttgtatggacagtttcaaaattaggtaattatcaacaagccctcttgtctaagagaaacaccacaggttttgaaatctagtaggcaactctagctgtactctgatcttaaaattatcagggttaagaaaaataatttctaattaaaccaagatggaccctcacaatttgttgccactcctctccgtgtgtgtgtgtgtgtgtgtgtgtgtgtgtatcaagacacgaacaaaaatcaggagaaaaatatagatacatgccaactgattcaggctcaagaaaatacattttgtcttctctatgtactttaaatatagtactgctaaataatactcctttgtactttaaaataaaactagtactgctaattaatactccttaacaccagctaaaattattctacttcaggttcttcatgcttgggtgattgcaataagctaacaattagtgtctactactttagtttttcatccaactattttcttcatatttctcagatgattcttttcaaaacaacttctaatattcttcttatacttaaaatcattaaactacactcaaacaatgatcatataatgcacacacattacagatccttaccatactttactaaatgtatgatagagactgaactgaattagaacataagagtagtgctataaatctagggtttttttttctattgttgccacaacagaatatctcatatttaacaattgatataaagacaaaataatttctcatagttctggaggctgggaaggtgaggttcaatgcagcgatagcttatacatgtggttgaggattctctgttcttctaagatggcaccatattgctttgtcttccagcaggatcacagggtccacaggtgacagataagcaaaagagaaggagccagctccttagacaactattgtaggggcctgaatcttatccatgagtaatcactgtcatgacttaatcaccttataaagataccacatctgaacatcagcatcacactggtaacaaagtttctacagattaatattttgggaacattcagtgattaaataagagtaaattgaaatacaatcctttctcaagttcagggccattttaaatgattgttcgtaaattctgtgtgcatagtagtctttaaatattaataataatcatttatgccaaaataatctttctacatcttaaaatggaatgacttccccaaacattctattcactaaatatgtaagaaagccctaaatgtcatgtagacttttaaactacattaagctcatatgtctgaaaaacagaggaatactatagtattgtcagcaaactagagacaggctgtttatagcattgggctagatacagcagcaaggttttcttatttccaacctagttctttattcaatagatgaagaaaaatcaattagcatactgaattatttgtagtgttgttttgacataaggttttattttttatttttattttagaagcactcttatttccatatcaatccccctatttcttcgccctctcatcctcctatgctccccactgaccccccccaactcactccccaaggatagtgaggccttccaccggggaccatcaaagtccaccacatcatttggtggagggcctaggtcctctttcttctatctgggctgcaatagtatccctccatagggaatgggcttccaaagtccatttttgctctagggataaacactggggagaataggacgggggaggagaataggaaagaacaggaggactgagacaggggaagaatagggaagggcaagaaatgtgatgacttgatagagggatacagtatagatttggagaaaagtctggcacaggggaaatgttcagggatccacaggaatgaccccaactaaaaatctaggcagtggtagagaggctacctttgatgcccttcccctataatgagactgatgactaccttttttccaatctagagctgtcatccagtagctgatcgaagcagaattaggcacccacagctaagcaccgagccatactcatggaatccagttgtggagagggagtagggatgagcaaaggagtcaagaccatgctgcagaaacccacagaaacagttgacctgatctagtgagagcatggagatcctagtggaaaagctggggacccagcaattgaccaaaccaagccctctgaatgtgggtgccagctaggaggccaggacagtctaagggacataaggtttttattgcacaagatacataaatttatagacaaaatttcatgaaaaacttataatctacattttaaaaaagtgaagtagggaagaaagaaagatgcataggaaaacagacataactgaagactacgagggccagtgtgctatgagtataaattcaggaatgagattagtgaggatgttggataagcaatttgaaatcatcaaaatctaaataaattcaaacctacagattccagaaacttgggaaggactagaggcaactggaaaaaaacactgacctatctgcaaaactaggttctgatccttcctacactcctgtattgtttgagatatttgaaaaaaatattgaattggtagagttgaaatactctcatcggtaaaaatgagaagaaacaagagaaaaatgtcatggtaattctagcactatttatatataatctaagactgaaatgcaggagctctctcttaagaaatgaggacaggaacttttccaatgacatgagagacagtgacattgagcagtgctgtcacatagaaaggaatagatgaaacctaaaagccaaaatcgattttatgtaagtattatattttgcacaagaatcattcaccagaggcaattcatcatatagtatatgtatataaaggggataaaagaggcatgaagacaaatgttttaagataatactatcccaatcatggctcagagctatctaggactagattccctggaccagtgtacatactcagagctagaaagtaggctcattcttcataatgaatgatagcagtatagaaacaaaggagttttcattttcatgctactctctaatccagactttctgattttatattgcggttcctaatattttagattttaggctatagaacagagtaacacagaaacttctaagtactcaatttgatgacatgtgcataggcctatgaaggatagccaaaccaactgttctgtaaaggagacaacaattcacaaatgaacaacagagaattcatggtgtcattgaagtttacatagtcatcattatacctgcaaagtaactgatttcacacatctttcctctgaaaaagatttttagttcggctggcaataatccttgcaggcttgtcaaatgcttaaaatgaatttaccagaaaaaagtagcatctggccaaactaatcataggcagttgttagctactttactgaaaatcattggtagaaatgaccaaaggaaggggacttttaaaaggcagcaaattcaacagaattactattttaatacaaatttagtaattaatctccatgaaggcagacatcagtgttacaaacaacacaatttgccgttaacttctagcacacagctattcttcctgtcatcagaatcaggaagggattttaccaacagagaatagaacagtgcagttctttgagggaaaaaaaataggatcagttgttcatgaatcttgtaaaaagagagttcagaggacttttaaaaacattttcctccttttatttaactggccaaatggtacatcatattttacattttatataatgtcaggcagtatagagctatggcaccacctattgtgatactatttaatgctgacgggaaatgtcaagtttattatgtactggaggaacagcacctggaattcagtgatcatgaaaatgcaaatggtatttctttcagaagttacttctgagatcataaagcaataataaaatatttgttgcagcatttgccaatctattgaatataaattaacaatagagtacctatgtgtctgagacagtagtaggattatgagcattaacaatactctttcatccagtggccaacaaattgtgataatggctactagaacattctggctggacatcttcagaaaagtccaaattaatccctccctttcttgtctccgtccatgagctcttcagctgcctatgctctttccttcctgccatgctttatagaaatgcaagtagacatcagatgtttctgtcatggtcttcactaagttaggattctctaaagggagaataaccctaaggtattgccaaacaatgccagatgaggctacttcaggtatttcaccatcataaatattttaaagtggtcactatgatttagaacttagaatgcatgaccagtaaaaaacaattaaaacattacagtggaatacactatactgtagttttatgaacagttctttatagtcccaaactcttaaaaatacaactccaagaattggatttctgaagaatcccacataatttattatttaaaactttaatgtttcatgggaaaacaggtttagaggcataaaacaattaagttattttaaaggacgtctttaccattaatatctaaagcaagtaaaatatattagcctagttcttcacatcatgaagtccaaagggataaatggcaaatagtagacccttccttcatcaaacacaaggcaacatactccaaagatgataaatatataacttcatgtttctttcagtgtcctaaggtatcatttcaaaatgtagcattttcattgtgtcactgtgcctgcatttcaactccaactttcagtatgctggaaagtgaagagacagacctctgactatctctggtaactacataagctctatcaccttatcaagttcaagattcatatctaaaaggaggtaaaaaaaaccatattttacctcgtagagtgtgtgtgaagtacaaaggagataacacacaggaaaatacacttatcagttgcctactctgctaaatacttaaaaacgcactgccattttgttctgggcactgctagtttactttactaatctgtttatcacccattctcacttttaaaaacgatataaaaatgtatatacacatgatagcaatttttctaagaaagacacatgtctagggacagctgtccaaatatgccatgcattataatagtatgacagataaaattaaatgcccacatagctgtagctatgttcaagcactctggtgctctctagggatgtacaaaatgaaagttcaatgcaagatattacacttccatttgtggtcagtgcaagatattacacttccatttgtggtactcaggaaaacgtacttcaacagaatgacaatctacctgattaaatttcagctgtcagagaggcatgtaggggtatattctgtgaataatgaatcatctgtagaatacagaccttagtagctttaagagacattttaaaacccaggaacttggtctcagaacaatggctttggattttgactttcaacggcagcatgctcagtaataagcacaatgggaaagtgcccttatgatgcttgtgttaactcattttggctctttattgcctaacataatatttttacatgctttattttctactgtgatttttcaaccagtacattctgaaagtggaaaaaaggggctctgtgttacttcttaatgatttagtgactacagtgtttgacaagaaaggtgctagggagagaggtttcttcaagctatgatgatagccaagttatttgcccttttatacatttaaactgaaagaatacttctgattgtcacttcttttcctaagctacatcaacaaaaggtaaaatgccatctgtcctggtccctttgctgcaattgaaaaagaagtctcaagaaataatcaaaaaatttcttgattgacttattgcactacatgagataataaagcagaggaaaagccagagttacaatgaattcaggtcaagaaaagagaaaatgcttatattatacttgtttttaaaggaaaccacaagttgcattatttttttttaatttgaaaaatatgagtggaccttgtattcagtaaaccaatagctaaacgttggtatatcacagaaactaaatttccccaagtacaatgaccatctgtaattatatgcataaatcaggtgacacaatggacaggagtaagaaaaactgggtctagaaaaaagaaaaaagatagtaagtgaaatcatacataacgaggttgattcgatttaaagtcattatgacatgaccccaaacaatacaccatgtaacttacagggaaaaaaaaacttcttgagaaagaatgcttcctttgcattgtatagaagaaaggatatatgcacatttacccagtctcctctcctagttctggaatttatgtatcttttcccatcatgtcatgctgctctttgttttcgttctgtcatactctagtttgctacttctcagctcctagggcatactacatagtttctgcctagataccattttcttcttgattcccattacctgaaagtcctccatgttgtattgtctgacattccttggccttccctccctccaaactaacattagagtatcttccatacttctcatatcacttcccccaatgcctgagtacatgcatatggatatactcagttcttccgtgtgcctattggatgatgaagacaggtactatatcttgtagtccaccatcttggtcctaattgttaatgtttggggagctgctgttcttaagatgaggtaaataataaattacatatggaagactaagatactaagctacaaagttttctctatttttttcttttaaaggaagtgaggcaaagtaactaagctaaatttaatctttcaaattccttaggtgataagttaaacttcaaatggactcataagcaggtatattgatcagctaggaaaatcatacgtttaaaaaatatagccaataattttaaggttttaaaaatgtgtgtgtgtgtgtgtgtgtgtgtgtgtgtgtgtgtgtgtgtgtgtgtgtgtgtgtgtgtgtgttctgattgcatgttagcctgcatgccaggagagggcatcatatctcattatatatggttgtgtggcaatatggggctgctggaaactgaacttgggacctctgagatagtaggcaatgctcttaacctctaagccatatctccagctcaggacctattcccaatcttgagctgacttttgagaactcaatccccaatcttcattgcttaaccgaaccttgatgcagggggatgagctcagtccagcctcaacttgatatgccaggctctgttgacaaacatgggaggcctgtccttttctgaatggagatggaggaggagtggatggggtgtggtagaagggaggaaacgggaggagaggatggaggagaggatgtggttgatgtagaataatttttaaaattttaataaaaaattacaattgtagaaaagtctttgctcttttgccaggggtggctggtggtggtgaaatcagattgtgattcaatctataatcccgatttaagatgaaaacatattcttatatttggtaatttaaaacattttagttctcctaagtagtaaaattggttgattttataataaaattgttagactgatgagatgttgaatatccactttgaaaactatagtaagagttggctgtgatagtataccattagtgcctgggaggctgatgcagcagaaacatgagttcaaatctagactgggaaaagcagaaagttccaggccagttagatttacataatgagattgtatgtcaaaacaaaacaaaaacctgtggctgcagataatttcaaactgagagcttaactattccattctcatggcattcactaaactttgggccaaattaactagatatttggacataatgttgattcatttctgagtgtctttttggagccattactcaggtgctagcaggaagtatttttgttcatggcttccaaggtaagttctattttggctggaaggactaattagattgaaaaaaaagtttttgttaattttgttaatcaattatagtgacttagttaacatttgtcaggcagtttctataatgaaggaaccacaatacattatctgcttataatatataccataaaagtagcatatgctaatttgaatgtttactacatatttgattacattcatagccactattagaaccacagtttctaaatgggtatgccaatctttagcccagggtgacttctcgaggtgaattatgaaccccaactgaaatagtggatttgtaatgggactgacaattttaactatagcagcatgaacaacattgacgataataaaatccttgcttagatataactcacacaaaaagtaaaagccagaggctatgaacagctcagtacatttaaaccatttttcaacccatttgaaatccacagaattctatattcctttccaagaactacctggtagtctttcaaaattctgttttgtccgactaaaaaaattgtatacatgaatatgtcatatgactccctgtgaaacatttatccctttatcttcatctaataagagtgccagtgaaactttcatgaaataaatgttattcttgcctggccttgcttttcatttcaatatccctgggaatagaggtggtcagtgaatcagcagaagtaataatgtgtcctgaagatgcttattttcaaaggctgttaaagtgacaaagtattcgaaagtcgccctccctggggagcagaaaggtttgggataggggatccttgaggagcaggggaggaggggagggagaggtaactgggattgtcatgtaaaagaagctagtttctcattcaaaattggtttaattacaattataaaaagaaaaagaaaaaagaaaaatcagtgtaaataaaagaggataagactgcttcaaaatgatctaattaacaatttgtttttcttcttgaatgcaaaaggagtaggtgctattttttttcatgaaaataaaataaaatgaaataaagactttggaaaaaaagtactttacccaagaagttctagcaagaacaataaagatggttgctattttatttgcttgtttatttaatgatgctagggatcacaccctactgagccacaccctaatcctgttcttaactttatagctaagggattacagtactcatccatctacagccacaaacattgaaccttttgatagctggcaataacaaccctccagaaaacattgcttgcctgtgtcagtgactgttcttgcctgtagttaccctcttcaagtttagtttcacaaatagaataaaacagaagtgatcaaactcatcttaactgttacggtccacttttgtaattatatatgacagactgaagtctttttccccctcttagctcagatagttgcttaaagttaataaatttaaagacaaatacaatcttaaaaatcatcttccaaattgctgtgtttgttacataaatttcatattttgaaaagcactacaaagctgggtggtggtggtggtgcaagcctttaatcccagcatttggtaggcagaggcaggtagatttctgagttggagttcagcctgaggtaaagagtgatttccaggacagatagggctacgcacagagaaaccccgtcttgtaaaaaccaaaactagcaaacaaacaacaaaaacaacaataccccccaaaacaaacaaaaaacactataaggccagagtcaggcaggacaatgaaaatcatcaactcattataattctttgggattcaagaacaattgattatagatatatttcttttcatgagtatgactgattttccttcaaacaagataatgttcacagagaggacagcaactacagaaaattaaaatgcactttccaaaatatttgcacttcattatcatttgaaatcacagtatagcttaatatatacttctacatgataactatttcaatggaaaataattcttagagaaataattagtttggggagaaaaagagatgccgcacaaaatacaaaaatgtgaattgtttaacctcaccaaaacacttaagttttcagacttagtcaagcaaactaaactctttttttgagacagggtttctctgtgtggctttggagcctatcctggcactcgctctggagaccaggctggcctcgaactcacagagatccgcctgcctctccctcccgagtgctgggattaaaggcgtgcaccaccaacgcccgtcgaaaactaaactcttatactttataatttaattgatgatactgaacctcagatgatagcacacaagccttgagcttcattatcttattttctatgaacatgcgctgtcatactttgctcttcgtcaaattcatctataacaccctaaaagtttagatgtatgatgtagccctggcatcctagcttcttttcctgttactgtgagataaaataccctgcaggaagtaatttaaggaaaagtttttttttttcccctgactcacagctcatgatctagagcatcatggcagtgaagtcaagggagaagctctgattagttggtcacatcacaactacaatcaaaagacagagagataaatccatgaggctgttgagttccctttcctgatttacatattctaggatcctagccagggaagtgcatcatgtagagcattggttttcaatgtgtgggtctcgacccctttgggaagagggagtcaagctaccctttcacagggatcttatatcagatagcctgcatatcatgtatttacattgctcttcataacagtagtgaaattgcattcatgaggaggtagcaatgaagataattttatggttgaggtcactacaacatgaggaactgtattaaagggtcacagcattaggtaggttgggaaccactaatctagagtgtgtgagtcttcacaacggaattgaagtaatcaagacaatctcctacagccatgtgtagtggtcaagctcccagtgagtctagattctgtcaaattgacaagtgacactaaccatcatacttgggtgccagtatgttctgggaagagtgttaagctaatatggtttgcataggagagacacaacaatgggtgcagaaattcatataaagcataactctaattctaacaaatagttatcaaaagaaactttacatatttaaaaagaagatacacacagctacaatttaaagacaccaggtctcaatgctaacaccattaaacaaacatggtcattaatgatcacacccttttagaaggtggacaaccgaggtgttatttatttatttattattaagttacataagttaatgagagtggatgactattctcagtaaatggagaaagaaaaaccaagtggatgaaaaccctaaattttaggaatctaacttaaaaatcatttgtttagttttatattttctgggcatgaatgcttgccttcatgcatatatgcatgtgcaccaggtatgtatggtgtcctccgtgactagaggacagtattggatcccttggatcaggagttatggaaggtagtgagtgagaagtcacgtgggtgatgggatctgcagctgtgtcctctgaaatgcatgttttcagcactgagccagctctctagcccttgatgtaacttttatgcctttaaaagatgacaatttgaaagtaaaactgtttgtaatttgtatgagttaattatatatatatgtatatatatataattcccacaacatattaattaaaatgtagaataaaaaagctattagtggtatatcttaaatttataagtcatttatagcttttctaatttttctaatataatttccgaactgttatagtataaaatcacaaaatacagtttttaaaaccttagctctgattaattctgcaatcttaacacattttttttgaaaaatcacacaatcttcctttctatataaccatgcttaatactgcacatggcacttactaagttctgagataaaaactagtgattattactgtcaattataggcatcagaaaatgcataattaaatgaagcaacagaattcaagataagcatttaaatctaggcagtggtagagaggctannnnnnnnnnnnnnnnnnntagccatccctctaaactatataccaaaaatatgcttttgatcatttagtttacgatttttaatatatatcttctacgtgtttctaactttttaataaatcatgtagactatccagttaagtactttctattttttccttgcttccatgtttatgtatattcaataccagaacattatgagatactgggacttttgattgcaggccaacaattcttctattaaaaactagagatgtcattcaaaagaacattaccttggggctgggatctgtattcagttaccagttcatttctcagtagtattaggtggctcaccgtggatgcatgaatcaagattcacaggaccagtctcaaaataggttaatgtaactttattcagggagaatgaacttacacaagaagtgagtgaccaccaagttccagctccaacaattcacccatgctgctctctgtgacctgacccagagccacctgtccccaccccagacctaaaacccactcttctccctggcctgcataggtaaccacgccaaaatgggcgtgatcagcgatacaggtgccagcggagtgggtatcttgctacagctcacaactgcctatcagtccggtggagggggatttgatgatgccctctgatctctatgagcatctgcatgcatgcggtacatagatatccagaaagacacacacacacacacacacacacacacacgatataaatcttcaaaataatacgaacttctatatttctaaaatattatttctagaaaaaaaaaacacccaactgaaaagtatgtaaaaatgtgtaaagaaaataatacaagttaatggcattatccaatatttcagaaatatttatgatttaaaaatgattttgatttttacatttatttattcagatacttcagatacttatttattatttggtgttggatattgaatacaaggtcttccaatcgctaaacatatgtcaaccactgagatgtaaccccagtaactgaccttcaattttaaaatgaatctgaacaaatataaaacctgctcaaaaatcaattgaaattaacatccacatataagcttaagtaaataaattgttaaatatgtataacacctttttctgaaggcatttccacactgaacatcataattactacagagaataaatactaccatctctattttacaactttaagatatgtacaaatgagaaaatatgcattgagatgttaaatgaacaaactatgatcaagcaaatggctggatgacaaaggtaaaactagaatttacatatgtaattaatcctatccctggacacaccagttttttagtatgtttcatttataggcagctataccagcattatttgctaaagagccattagcttcccaaatagtactgatgtttcccataactactttcaatgagtctgcagatcaaaatgacagttcatttcttcctgttttacatgaaaggctactaaggaatttgattcggatatcaagagtttacattttccatttactaagatcctctcatcaacttgtgcaatccaaaattccagaaggaaatcacaacaacactgccacttcttataattggacctttgtgttaaagttagtttgaaatgtataaaaactagagaatataagcaactgtttgggtggttctgtaattttcttgaaatccttatacctctatctccctcgacaacacagaagagcaacaaatcactaagggagtgatgaaaattacagcaatggtaaccaagactatggtcagagtgccgctattttccacataatatccaattagggtcacaatctctctcccatttatgatatgactcctatggcaggaatggttgctgtttgtgattctaccttctgcccctaccttctccttccactttgacaatactacttaacatcagttatttaacctgttacatcaaacatgtcttgacattttcagtaagtttaggggccaaggaagtgaagataactgatgaatgattatctgacttataaggaactacttggaattcataatgagattagactgaccaaaagttacaaatattctatttccagacattgaacttaaaaaaactgacagcagcaagaggttcttggtaggagttttaattcactgtgtgataagatatgttaggattcatcagacagaatcatattgaaaacaactagaataaagacctccttgatctttacttgtatataatgtagttgatggattttgttcttttacttagtaaagaaagcataaacatcactctcagattaaaagatgctttgataaaatcctaaagtgacatatagcttgctgaaaagcatgaattatttacaataatgtcagatgaactttgacgacacttacctatttatatttatacaacacatatgataattttaatgaagcaggcataaagataaaatgatcctttgaattaaaagtagtatctgcctcacctttcataagctatgacacattttaaaatcatgaattattacctttatgtattttactgaagtttaactaacatcagaaagtgcatgtaggtgacctggttaataattttgaataaactaaatacatacacagtatctagatcaagaaaaacaacatgacccgtacctctagaagcctttattttaactatgaggatattttcgaaagaaaatttttctcttaactcctttaatatctgcagacatgttttaagaaatataagtaatcataaagtcccacagtaggtttaaagacagtagtaagtttcaactgatgctgaaaagataatcactgagattatgatatcaattattattgagaattattaatttggaatagagccactaaaacagacactctgtatcaaatgtatgaaatgaaaaggtcagacattttctcatccccaagagaaaaaaataactactgaaagtcagaatagaagcctttctatagaaggatgggagtaaagagccacacagagtacaaaattgcagggaaatggaggtgacatttcagtttggaaaaaaaaaggcacggaagtctaggctctgacatagtcatggggaaaatggcataattcgccagccaaaaagcctccaggatacaaaggctaaggtgttctaacgaataaaagttaaaataccctgacaaatgagctatgtaagcatataagaaacgtttgttagaggccctggagtcactaatcacctgcatctgtaaggtgctgggcttgattccaagtactgcaaagttaaacaaatgaataaacaaacaaagaatgaagtacattacacaaaatactcaaatccaaataatgtatcatcaagaataatatattaggtatttaaggagggtaaatctcaccgtaaatgttttcaccacactttaaaaaatcagcacacgtttcttttagagctcaaattctttcccttattctactttttgttatttaggttgttattttacattctaagataagatctcactatgcagccaaggatgggtttgaacttgcatttcagtcttagcactggaatttcaaaaaacacctggcatatctttactatcaaaaaaaaaaaaaaaaaaaacgtggcttttaaacacacaaagctaactttgtaaaaaaaggaaatttgttaaaaacaatgatgttttaaaaatatttggttccataaaacttaatgtagcattctcctacatgttaaaatgtttatggtattcacaaaatagaatagaatgtctgacaaatattgttcaaattatttaaagcgttatacacacaaaaacccgagagaatcttagcaacaatttaaccatgtttattaaaacaatatagtattttatgtactcagtgttattcagactactaacacttaactaaggtcaaaacattctactatgctagtaacaatatggttcaatgaataaaggatcgtcttgcagccaaacctgctgacctgagtgctggccaattccccacccataggatggagaaaactaacttctgaaagttgtcctataacttccacttacacacacacacacacacacacacatacaccatgctttccacattgatataacatgactctgtctctctaaaagaatataactcaaagtctaaatctgttaagaaattgaacagtttaacattttctcacatcttcaatcctgtgagtgtagacagaggtttcgtgcccataagataagtgctctaaaaacactagaatttactcaacaaattcatatagtttttaccaaggaaattaacaatgggtaataatggaagcaatttttcaggcattagaataaagacagcaactgcaggtgctactactggcctgagacagtcctttaatgctcctcataaacgtctaagtttggtgagctatacaagttcagttctctatcatcaacccaacggttttcacttttaactttctcattgtaagaactgaactacagagtaggaaatattaagccacagtgtcatatattgacttgtctagcttactctctttatagtagacagtaagtaactaactaaccatggaatatttatctgattttgaaaaatatccactgcattaaaatggaatcagttatttaatttcaattttctttattgagcacttagatgtatctgggtcgttgtgtgtacactgtgactgtgagcccaatcaggaaataatctatgaatctaagaagttaatttatacattgcatatagaaacaaataaataaaaatacaaatgaggaatgtgatctactatcaataaggctcaaatactgctactgacaacaataaaggaaaggctaattctttcctttctcagtgtttacttattatgctctccagtatcttggtgtgagtcgcaagtgtgaaaatatggctgaaatttgaacggtctttcatacagctgtgtgatcatggtcaatttcttcatcatttgtgggctcagtttcttccactactggctctaacatttttcttctttcctccaacttttatgctctgttattttacattcattattacttaatgtttcttttctttaaatgagaaatgggtatttattggggaacacttacacagaaaaatacaaagaaccgctgtagcgcttctctgccagtcctacaggacacggctgaccaaagagaaagacttgcacagcggagaccatgccttaggctttcctctttccacttatatccgcctgaagccacgcccaaagggggtgtggccacagttacaggcaagaccactacatcagtgctcaattttcaggaccatttttataaaaatatgcacaatgatagttggatttattcggaaattatttgagatgacttaatctattagagcattcacctgtgtttcttctgtctttgatttcacttaaaaacccatttacaagcaaagcttaaagacttaaaaaacctcacaacagactttcaactgtcagtacttcattaggtgtgtatgcttatgtcagtatctgttctcaatgactgtgaccaccatctaaatttttattcactattaatttagtcagctgaatagatgggctggaaatgagcttctctgtacaaatcccattctcatcctgtctctgttgcaggtgtgtacacctgagaactatttacttgaagcagcttgtcgctgcttttaccaagtaagactttcccacattggcacttatcagtatctaatttagatacacactaatgtaattccagtgagacagagaaatcttactcctacatagctgcatttattacctcctttaatatctgtatagagtacttccattacatactcatctataattgttatagttattaacttatatgtttttgtgtccacactaataacatattaacctaaatttctgattctctttttcttcctatgaaatcagcttactgtcttgtgtgtgacttccttaatctaatacagcttgtcctgttcttcttagggttgtattgtgtcaatattttatgtttctgtatattatagattagctgaatataaaatattctccaaaatatatccacaggtttttgtttaacatttgattttcagctactgggagatggtagaattgtgttttcttttttctttttcttctttcccatgacacttatagaatcttaaattgttctaattttgctttcctctaatttttctctattcaaatttacacctttaattcttagaatttccaaacaagattacttttaatgtgacatttcaccactacaaatcctgagaagaaatcagtatagtcacttagcaatacaacatagaaacaagacagatagcaaaaggcaaagctgactgagaaaaatataatttaattcataagaaattaacattgttcatggaaaacttaactagtttttatattgtaagatggcactaatttaaatgaagtgaaactctttctgatttatgtaaaaccttaggattaatagtgccttcaaatacattaatataattttcctgcattgaatagaatacttttaattaaactttactaacccttttggtttaatccctggagctaacccataaaacagtaaaggttttaaatcaaactataaaatcctcaaagctaaaaattaaagtgacagctatggtgaagagagtggataaagaattcaccaaatatgtctagtcaattattaatacttcatatattatatatctattatatataaacatatattcacatgtcttgtatttctattgctgtgttaggacaccataatgcaaaccagcttctaatccatcactaaaggacatcaaggcaggaactcaaagtgagaacctggatctgggagtgctgcttacttgcttgctcagtttgccttcttataccacccaagaccatcagaccagagcttttgcacccactgtgagctaggctgtcacacatcaatcatcaatcaaggcttgccacaggcaagctaatggaagcactttctcagttaaagcttcttcttcccaaatgtatggtttttgtcaagttcacacaaaacaagacactgtagcacacatgtataatcattaaaatgaaaaattggggaaaaggtaattgtgtttataacaggtacgtttttaatgtgtgaagatatcaaaatctgtacagctacaatattttctttcttgagacacgcttgtatgtcagtcactaattaaaggatctacagccttaaattttagaacagaataaaataatttgacagtaatattttattaatgtcactgataataaggttatatcatataccatttgcttctgaacttcagatttacaagaatttatgtttggaagaaaacactgtactttcttactctacttgcttgcctcccctgtcagagcaataatagctaactaaataactaaacaaattcaaataaaaacagaaccactttcaaaatctccaggcaatgcttcataaacttctcccacaaaagtacccctaatggaagcgaagattgaacacccacccctagggatctgctgcaagtgtgaaatttctttgaagtcatctgttttattttaaaaattcatgtggcttttgcattctactctgtaatatgtatctgttttaatgtaaaaatgatgtgttttcttcaatatctttgagttacagagctctaggaaaatatgctaagttgataccaaaggcttacttctccaagaaatgcataattttaaagcttagctttgtgaagaataaagataattatacaaatcacttcattatcatttgaaatcacagtatagcttaatatatacttctacatcatttccctccattatcaggaatttggaggcctgtgtttttagtattgagtgagaatatgcctgttgttggccattctagacagaaaacatcattttcttattaggtaagtacccgaattttaataatcacaaaaatagatactggtgctcatacatttgttcattgtatgtgaaatgtagtacattcattaactcaggttttgcattattcctttacctccaatttttaaaaaagtgttctgttttttaatagaaggggatcatttcacaagacaatccattttcaaaagtaaattaattatatagtgttgatctatttttttatttccactgtgagtgtgtgaatattgtacatacagtatatgaaacacagtaatgaatgtgaaagaatttgactcaaatgaccctagaatttatggtaaggaagcaaagacaaattactctcaaatattaaggacaagtatttaactataaataacacataaatcgcttgacctttcaccatttcttttcttcctgtagagactaaacttaacagtattttctcctgtggctttggtaacaagacattagaaagaaaggaaatggattttgaacagtgttttgacaaatgatagtcagttgtcttagaggacaaggcaggtgagattttcaggcaggggatgcagccggaaattgtacacacagacaggattattataaaggaataaaaatggctcaagagaatatatgtctgggtacactgaaatgagaactgggaggaaatgaaagtgggccgcaagcaggcagggtgtgcttaagaagtttttgagttgagaactctttgaatttcacagggggagaaaagaactagtcacaaacaagtggagagtggggattgctgcagcccaaagagtgagacaggaaaagggtatttggcaacagtcttgtgaaaccactgtctggatcaatacacaaatcaagtaatccgaaaaaaatggatgaatttcgctgttttaatagacagaggaaaggaaagtgatgaaactgttaaagaaaggtatgaacggatttataaaaaaaagcccagatatgaaagaaacaaagctgaatagaatgcatgcttatctgaaccttgaaggactgtaagacatatttaatagttttcttctaatctaacaatcaaaacactgcaatgtacttactggtgcatcaattcttaacagtactatcactatcagttctaatgacagtagtataacaggtgtgggcttactaagattttactgtatgctttgtatgctagtttacttatttcatcttactgttattgacattcactgtgattttctagatggggacaagaaatcactacctcggtgctctgaaactagtaaataatacaattagaattagaaattcatgataacttaaaagtttttgttctgctgtctgcctttagcagttgtaacaatggctaaaagtatttggtattaatgttttagaaacagttgaaaaggttttgttctggtgcctgcatttagcagcataacaattgctaaagtagtcgatattaatgttttagaaacaacttgaaaggttttgttgtctgcatttatcagttgtaacaatggctgaagtactaatgttttagaaacaacttaaaaatagaaacatacttataaatataactttctattatattacaaacatttaatgaagggaatacttaatactatggaatcacgaggaatcttcaataatcaattttggtccttggaccacagtacaggacacaatagaaaaaaaaataaaaataagacaaggatctgactggtaatcccatagcagcagagaactgcagaaccatgtccacaagtgacattttggactttccaggatattccttcaaaagacactaacagggttattcagtttttagtaagtttgggaaacatagttttgtgtccttccttaaagtctcaaagttacagaatataatcattacagtacatatttctcttatctaaaagaaaaaataaacattgtacccacataacatcacctccagaaggcatttccttgattcattttccttttacattgtattcacttgttaagtgtggacaatgttgatgaagctattcacactgccttaaaatcttacaagcattctgctccccttgtgccttcattcctgaattcagtatagagtgatgtgggacctgagtctgccttggatatttctgaggtgcctaccttactcctataggtccatcatcaatgactctgctagttaacctggcacctgttgagttatcactggacagcaatccctttaccatgctgataaaacttcagcctcatattttacccattccaaagttctttcttctttatctaaactatagaagattatctttaaaaccttctcaaggaacaatgtgttggaatcactttggaatcaaaaaagtatggttcatttacactgtacatttaagttcatatcaacttaaagaatagaatgtattgtttcattagaggtcaaaaaactccaatgacttagcactgttaaaaagaaagatgaagagaggttatttgaatgtacagtggagtcaaatatgagccaatcaaaactatttttccactttctaacatcaacaaagaagttttatgattaatagtgtgcatagcttccttttgaattgtctcattatactaaaacacataggctaagaatagaatagtcttaaagaataatgccaattgattacctttgcttgcactttccacatgttccagctcttcaggaaatttcaggatatcacggtgttgttcttcacagatttcagcaagaaaatgcaaaagggttgttttttgatctgctgactttgtatctctgatctggaatggaaaaatagcattttaaaatttaagtagacattttccttaagcaaatcaaacaaaagagtgaatatagatcataatgaagctcacttgacctttttttttttttattaagttggcagttgcttcttaatggcatctagtgaaacagtccaggatcttaaaatgaacttattattttataaaggagaaaaacactaatataaaaggcaaattaagccttaatatatattttcaaaaatgtctcaatcattatggcaaaatgaactattctttttatgagacaagaacactcatttaagtatttatagtaatagcctcagttaatgtgtgttgattctaagaacactgtggtctttgcattattataaaatatattcttgaaagatgcattcatttgtgagattaaatttatttctagctatcatcaatgcaaattaacagaaaacagcatgttttatattcttatacttgcaaggcccataagaaaaaaattacaaagttgtttctttcagacttataaccaaaatcagactactcagtcatgggaacacgaaattatttattatttatttgcttaacattgcatgactttttaaagatacaaggggaaaaagatgctatcaatagaatggcaaaaatctttaaaggatagacctcaaaaatttaggaggctctaatgtttccttttgtagctctctaaaactagacacagctgcaaatgaaatcagagatttacttaaaaacaatgcataaatacaagacaacatttcatatttttctccgtttattggatgttttaattctataatccttagatgatgtctttctccactggtgttcatactgatttggggtcttagctttaaggattactctgtttagaataaatatatcttcttcacaaacaggtttaggaaaggctgcagatgatacttaggtaattacaaaataaattaacccttattgttttagtgactaaaaacaaacaaacaaaaaggaatcatagcgtttattatatcaggcctatatcaaatctgttatgtgctaaaccttttattgactatttacatcctcatgatgttaacaaatacaaagaacattagcctcaagactttatgaacaaatggacacaggaggcataatgtagtagggtttgttgttatatttctttgagaaattctacaaatacagtattccatatatggaaaatatttaaaatgctgaactcaggctgattcaccagataccttttagtactacaaggttgaatcccacaatccaaggacaagctgtaagaacaaaaagcaacaggaacctcaagggcagtttatcttaagtaaggctagcagctatagcagaatcaatgggaagctctggtccccaaagagaactctttagctgggattactgttttatattttcacaaagtgcaacattttgcagtatgtgggacatttgaaaaaaaatcccttaaaacttaacatctaagatccccccaaataggtgccaaggtaaactgcaggaaaattcccccatccctaatagtaagaaaatgcattttttccaaagtctgtggagacaaagacgtataaacaaagaagagaaaaaggaacaacatacacttacacaatgttcaagataccaaattgcacaggtattttacagctgctaaaaatgtacatagccagtattgcaaataaaacagaaaatggtattgtcatatgctaattttatgcattacctttttctttgtccatggatttatattattttacagtaaaaacttcagcttctgcatgcattcttaaattgctgaatttgtacattttgtgtgtatatgagtgtgtacctgtctctgtgttgtttgcatgtgaatgcacgtgtttgaaggtgcacttgcttgtgcatgcatgtgctgaagaaataactcaatatatggtgtcttctattattccccatcttgctttatgagacagggtctctcactaaatatgaagcttgctattccagaatgagtggcaggccagcaagccctagcttgcctctgcctccaatcaatgagttagacatgatcaactctgccatttttatttttgctgcctaaggatcctgttccagatctcttatgtgatcaccaagcactttaatcactgaacaattttcaagtactgaaaagtgatttcatatttattcactctcagtgccactaacaatataattctgttttgcaatttaccatggtcaatggttgaatctacaaaaacaaatacaaacaaatgttattatttctaattaaatcaataggcctcctagacaaaatatgcttgtgaaattttagaaccataacattcccttaaaagcatgggcaaacagggtgaagcacctgccttgtcaatatgagaaatagctctagttggtatgggagacaagatgtttagtttatatagcaatatttatttttgagaaaccctcacacacacagtcttttttaaaagtctttggcaggaaatgatgaccaataggtggtctttttaaatctttctttctatgtataatccttagattaattctttaaaactaaataatattaaaatataatgcaaattattttccttaatgtagtgcattactttatattgtgtctgcagcatttcttcctttgtatcatttacacgctagctatagtctttctgtctcagtccatgtagtattgttcatttttagcacagaaggcaactataaacactttcatcaatactactagttaatgacatttatccaataatttgctgttgtaagtagacaagctggatatattcatctcttgggggtagaacaaaggtaatgtaatctgaatatgtacaaaatcacttccaaagtagttgggttagtttattaagagataaaattgatttctgtttgatatctggttacttaaaatcatgttaaaatttcatattcatgtcaaatatctaagtaaggaggtaggccggctccagcatgcataagtctcagaggcaagtatgctacaagcatttcaaagactggtgtagccagaagcaaagtgccttttggcacctttgtctatgttttggctttattcctacctcaaacttcactgaggtttgagtgaagttgagtgaagtgaccctgtctcataaagcaacttcacagacaccagacttatttttataagctgccaaaggattgggagaggctactccacaatcacctattttgcgtatttttcgaaacctaaaaataaaatagtggattcataaaatagaaatattttgaaaagctaaaaaaatttgtattatttcagtaacctgacttaatgaaaatcaatgaaaatatgagtgaatcactgcaataaccaagatctgttagctaataaaccacatacataatagttttaattgcagtcacctggccagtaattgttatacacaaaagattaataactgaaattaaatgaattcaatctccctaatatttaataacatccagactgtacatgaatacaaaatacccttggtagaacaacatctacatctatggccaattctgttctccccccaactctctcttagatttattgttttaatgggcactgctgttttccgtgtatatattttgtgtgagaatgtcaaaattcctggaactagagttacagacggttgtaggctgccatgtgggtgccgggaaatgaaccagggtcctttagaagagcagtcagtgttcttaactgctgaggatagtaaattttgcatgttcaaatacaatactaaagctttagataggtagagagaaaaatatatgagtaattaatgggcacctaatttaaaaaatcattcatttttatgtgtttatgtgtttgtgtgtatgccacatgtatacaggtatctttggaagccagaagagagtagaagatccccagaaactggagttaaagactactgagaactggctggtatgggtgctggaaacagaactcaggtgctttgtaagaacagcaagtgctcttaaacactgagccatctccccagggttccctaaaggacttattgattctatcgctaagtcattcaaacctagtaattgttggtcatggcatggttctgaaatctggctatttaaggacacagattcctgaattcaaccagggagccagaaacaacaacttaatgatccatatcaaccacattcaatccatctgtgaaggacctagtcgagaggtaattttcccttctgcttcaaaaaacccatgtttgtttgtttgtttgtttttgtcctcagtgggaacagaaaactggtagctgtccactgtagagcaacttgtcagaatgaaattttcttttttaaagtaaacaaagcaaatgtggttagtttaatcactccatagaaatgccattcttcagttctttaattcatggctaataggattgctttaaaatgtccaatgcaaagggtctatttcatctagaaaaccatcagacctccaacctctttcttttgcatacaaagctatttatgtgatggctcttgtttgtttgttttttttgaaaatgtcacttattgcttagtctagattacaattgcataaacatataccatgtgatcatagattagcacatcgtgtagttttatatatgttattccttgcttggaaacccgtatttgtctctccttgtatttatttgttaaatacctactcacactttaagactacttctctcctgcgagaatgttccaggtcgctgggcggtggatgcgcacaactttaatcccagcactcgggaggcagaggcacacggatctttgtgagttccaggccagcctggtctacaaaagctagttccaggccagcctccaaagccacagagaaaccctgtctcgaaaaccccccaaaaaggaactctcatttgtatatgctaaatgggaatataactaaacatatctctattctcatgtttattgcaaacgcaagcacttatatgcaagaacaccacactcacaaatgcaggcagactgactacaaaggctaggcttctccatgacactgtatgtgctgagaactaggtgagggtgaatgccagagtgaagttataagattctccactgtgcaacagacagtgtcctaaatattaacataagagacaaataatgatgtgcgttaactttgaagcctcaaggtttgaatttagtagaaaatatgtaagtacagagaaaagagaaaatatacagagtaactttgtggcaaatgtcaaggactgatataattataaggagttgtcagacataggagcaaaaaagataaatttgagtcactgtgaaaaaatgtgttttgtcaatgagtaacaggaagagaaaaatgggaataaaatcagaccccataagttttaagttgtgctaattaaaagaatggcttaacatgtcagaaaaccctaactttagagtgagctagttttagaatggagaaagcaatatggaaacactctctgagaaggtggctatgaacaactcattgtcttggctgtatttttcttaattattagatgaagagacaatcctattttattcattattattggatacacattcagacttgaacctttagcctgccatttcctggttcaactttcttgggtaaacacttaatataaactaggtataagataagtagttatgattccagacatgtttgtggaacttgatatgataaagtattatcagggtaattatcatcatcaaactataagaaatgtgagcctcccttagtttgcaatcgtagttataagtcacctaagtcccccctgacgtggctctcaactagcatgacaatttcctgtcttgccattaccctctctcaactctctccaacttcagctatgtatgtatctactgacacaagattattattgctttttaaatgtgcttcttaagacattttatattcaacagtgaaaacaatgctattcaatatatatttgttggttgaatgaaaagggaaagattcccatgcattcagttggtttctttgtacccatgaatattttccctttaccaggaagatatatctatgtttgtgtgaagggggaagaatcaatatgggctattcatgtgtcacgtgcctatggcagaggcactttggtaagtgccttgtatgcatatatttttcactcctcaaaacaacttagtgaactagttatcattatatccattttataggtaacaaagagcatacaggcagagttcaactgttaataagggatggtggcagaatacagccagttcacttatacatattgaaacttaatatgtactggatttaaaaatgggacgtatgttatgaagaatgtgtttggaagggggaaccattgcccaggaagatgcgtcattaataatgagtcttttccaacttcactgagtataattaataaataccacttttgttttttccacagtgatttatacaggctctggttgtaacatttattccacaatacataattctgttgacatactcagtatcacctaccagattgtgacctctatataaatgaggactatgatcagatttccccctggaatgttcaatgaataaatgcaccacacaagccaaagataattaaggctaatttgatgattagagaaatctttggtgaccttcaagtattgtttcagaatagtgccaaggacataaaattaaatgaaatggatagccagaaagaggaggtaatgtgtaaggataatttattcaaaatattgactgtggataataactggataatagagggggcagtagagccagcagctggaaaatggtgaggctagtggcaaaagttattataattatcatcctgaataagttcagcataattaggccagaggagaataagaactggaagaaataaaaatagaaaatcaagaattcatgggtgcctgcaactacccaggcccagatccagggttaagtgttggtccacccccaaatccatcttatctgtgatctgctggagcacagttggggggttgtcctcaagacccagagctacagggtctccactccccagggcacatgggaaagcaacaggatgtccaggaggagtcccagtgagggcccagtgcctataatgtatcagagaccaggggtctctaatcaagttaatgaatctttgtgatgaacacctgcatgtaaagccttatagataaaggggtttagtgtatgactcactgggtcacactgcagcttctgtaaggagattttccctttcttcctatttaaaaaaatggttttgttttcttttggagggaggaagttgcggggacagagtgcagatgtgggggaatgggagatgggtgggatctggatgcatgatgtgaatgacacaaagaaccaattaaaagggaagataaaaatatgatccactattttgaaatatagatttatataaacttctaaattcaaacaggtaatatttaccttattgtgtcagaatgactgttactataaactctttacaattgccttttaatcataacatttttgttaactagtcttgtattctctaatggcaattcatagctatttctctttgcttctaacgattttctacaaatatttatatgtttaaaagttttgtgtagatggaaagagatagtttataccgattctttgggagttatctcttagtttacttacttatgcaggttttttccttttttatttaaattagaaacaagcttatgccaatcccagttccctcaccataccctcctcccctgtcctccatcgaccccctagcccatcccctttcttctccccagggagggtgatgccttccatgggatatcttcaaagtctgtcataacatttggagcagggtctataccttcccatgtgtctaggctgagagagtatccctctatgtggagtgggctcgcaaactccattcgtgtactagggatacatactgatccaccaccagaggccccatagattgcccagacctccaaactgacattcacgttcaggggatctggatcagtcccatgctggcctcccagacagcatctggggtcgatgtgctcccccttgttcaggtcagctctttctgtgtgtctctccagcctggtcttgacccctttgctcagcactcctccctctctgcaactggattctaggagttcagctcagtatttagctgtgggtatctgctttttctttcatcagctactggaaaatgaacatggtatgtactcactcatatatggattttagacatagagaaaagaaggggaaagggacaagatctcctgaactaattgggagcatgggggattggagagggagttgggagaaagagaagtggagaagaggaagagagaggagaaaatgagggagcaggaaggttgagtcaggggaagaatagaggagagcaagaaaagagatgccataatagagggagtcattataggtttgaagagaaatttggcactagggaaatgtccagagatctacaaggttgaccccaactaagaatctaagcaatagtggagaggctgccttaaatgcccttctctgataatgacactgatgactaccttatatgtcatcctagagtcttcatccagtagcggatggaagcagaagtagactaattcggcttttgtttgacagaaccacgtgttctctctagagcagaaactgctcaattgaaattttgagagaaaggtatgacttcatctattaaccatctatcttataccatgttttataaattcattgtgatattaataccttaataaaagtgagcttctcaaattaaaaaaaagaattccaatgttctaggctagggatacaccttagtgggtgtcttgcatagccctggttcaagtctcaatacttttaaaagatgggaaactaattcatggttatcgactagaatattaaacagagaccccttgaccaagcacattgacctcatctggaaagttgtttgaaattaaaattaactaaataagaaactcaaggggtgtttcttgcttaatcaggggaaaaatgtgtgtgtgtggggggtgtcaaaaaaatctccaggtaattctgatgtatactaaggtgtaagtgcacactgacaaaatttccaggtcaagagatagtcaggcagttgtctacagtttacctacaaaatcttacaatatttcaaaaataacaagttgttctgttttatgtattttcaaagcttgatgtcaatttaaaactagagaactctagtaatctgtggctactaaagaacagaattgttctaactgttctcgattagttagtataaaatgaaactggtctgtatcataatttaccacttagtggtccaagagcacaaccatcaaaccgtgcatgctgtgctgtgtaggcctcatgaactgtcccttgtttattccttaaaactatactaaaattaaactcacactctactatagtgagtctggtatactgtgtttcagtggagtgatggactagctagcctagtagattattcacctcctcttaactaacttaagctggtaagcaaattgtcactcagaccttttttcagaaaacttgagcttcaatgttggccacaaaaatacctgtgatactaataccttcctcaggtctccaaggagctccatgcctcaacccttgggccatacagaatgtacttacaggaaatgtgaccacacagtgtctatgaagagaaaatgatgaagtaccctccatgaggcaggcatatgctgatactgtgttaccagagtcagcatgccaatgtcaggtataaagtaaattgtgaggaggtgttgtataggaaaaaacagtgggttttacacatctgccccaaagaaatcttacacatcaactttagagtgttacagagaaaacactcagctaagttcatgagaatggttcattctgggaagtagttagaattgtcttgtacaaatggctggagaatgtatagttatcatagacaaaaattgaactgcacatatagaataaaaggaatgtaatggcaaagtcacacatatgcttcctagtgagacatatttaaggaggtctaacatggaagtggtgttaagactgaaatttgagacaaaggtccatgccaatcaactacattagaagtcagctttccagacctctccctttctccttatatttatacaaatggctacaaggaactcgggctcattaagaagtcctgaattaacagttgctctctcctggtgagaagggaacagtcctactgcacacctatactggattgattaaccttaaaaagaaattagatactcactgaagacacagaatctggttgaattcttgaaatgaaaccatttaatctattactgtgatcagatacttcaactctatatctttccgtaaaatgttccctaattatggcttatttttccctattatatttatatattcatggaacagttaatatttaagcaatcatgaatgctccagtgcatatatcaaaacaaaactacttcgtgccagtcttgattcagcagatgaattctaatgttagtttcctttatttaaaaaaattaaattctgtgttctctgccaagagttgtttacaaattattgctttcttcaacaccagcacacatcgcaataacactgagaaagataatgtacttttaaggattgcaattaccatgaagacattagctctgcagctacggccagacaggtataatacatgcattcctgtcccggctttatttctgaatctgtcaccaaaactcattttttaaaggtgttacatgaccacagttgacactaattcagccaaatgtaatttacactggaaaatatgtcccaattcttggtataggcttgattgtcccttttttacactcttgatttctgtattataatggtacttccaacaaaaggggaacagatgatatcaattgtataaaaagtcatgcaatttaagagctttatacttgttaacttaatttatggtagcaatctgtgaaagcagaacttaaacttgaaaccatgacaacattaaatgtaataaggattcatctcttttgccaccttcaagcccagcaggatttttgtgctattagtttctcagagaagacaaattctgctttcctaccctcactgctctacctctcagggttttccttatagtatcacttagtcaagaagaatgcactacatatgcattagtctgaagtagccaggacctgtggcaaatcaacagttatttatgctcatttaggaaaggccacaatgcactaatgaatcatgtctgacataaaagcaggtctgctacttgcaagtgcttttacttaatcaacctgtctatagtaggcataccaaacaaattcttctgagaatagttttaagaaaatcaaattatttttaaattggtataaaaatagtctacaagcataagtatctcttgggttttgaacagattctccaaaaaggcttggtttatacaaataataaaaccacttaacttttattgtaataaacatttttacttaaacatgactatgtgaagtttcagagacagtgaaaccagttctttgttgtttttccgtggacataacttcaaagattatcaccagtaataaaaaagaacatgggcaataatgcaggtaaatgagactcagaggtgtgccattagtgcaagagtaactctagtagtcatcaataaattctttgaaaagtgaaatcaacagcaataagaaatagttatataagtatatttcagaatcttccttcaatcattcattcattcacctttaatactctatgtaattttaatatgaattagcattaatcattttctcctgttgaatatttttctcatcgcttttctgtttctgcatctctggaaatgattatcactgatatcttatcagtgatatcttattacagacaaaccagctatgaaacttctttttcattgtaagaaatgtatatgaaatttagcattttaaacacttggagttaagtgacactaaccaaattcacatgcctgtgaaaccattcctatatccataataagaatttcttatcatcctgagctaaaacattaaacactaacagtctgttccatttctaaccttgcaggtagctacatctctagcttttatctgtataaattttactatcctaagtacttcatatgaagacaagattaatcaatgatgcagaatgtacaagaagttcattgcttaatcttttggtagtgatacacaatcaaatatcaaaagaagaggacttgttgaaaagatggggggaattggggtgtcaataaaattcattgtataaacgtgtgaaactgtcaaacaacaacaaaatcttaacaaaaataaaaataagtaaagaaaattggtaattgcctggagctgtaaagtagatcaacagagtagggttgtgaggagtctattctagagactttggtgcgtatctgtagtactagaaaaatgccaattgcaccaaactttattataattgttcaagttttattatatgcctattatgtctcacaaaaatcccttaaataaattatagctgaggatcaattctcttttaaccactaacaaattaaatgctactaaaaacaaacaaacaagcagacacaaaattaaatttatgctttaggaaatcaataaacactctggcttttcttatatatgtcataaaaaatgaaatttgggagtgctacagaacttgaaatgggccaggctattgctgatgaaaatatctgacaaccaatcatttgtaccactctcccaaatttgagtacaatttattataatttttcatgttccttcacagcagatttctaaacattatactttaaaatgtttttatgttttggatggagcatatcctcccaaaaggctcatgtgctctagaattggtccacagatggcagcactttcacaattagagcatgaagatattgacttcataacgggctattaggatgtaggcatggcattaaatttcatatcatatttctgttaacatctaggttttctctgcttcctatcttccataaggtgagcttctttgctccactgtatgctccagccacaatattctaccttgcttccacaggaaaaaaaaaaaaaaaaaaaaaaattgtcattttaaaccatgaggccatggggcaaacagatgagataaaggtgtacatgataaagatttcattgaatttgaagagttaattcctttctctaaacagtcagcctccaaagagttgacatttcatcatacacagatcctttatcctgagcattaaatataaaaatgtttcactcatacttatctaaatataactcatgaaagtctcttagtatgggaggcagtgtttgatttttgtacctgattagtgtgtgtgggggggattgtgcacataaaaatagttttagttgtataatctattatttttgacttggcagtgctaaatgttatagaaatattttttaaaaaccaatatttaattaagaggggaggagaaagtagaggattgtgggaagtgaatatacaatgtaccttgacatatattattatgaagcttatcactgtataacagatgctaatgaaaatgtgcaaaaatgcagaaggtacacagtaacttgagaatcaattttaaatattgaagcattaaatcaaatgtgtaggggctggagagatagttcactggtgaacaacacctgctactcttgcaagagggtctgtattcaattccaagcttccacatggtggttcactgccatccataactccagttgtaggtgctccaaagccctcctctgacttccacagacagcaggcatgcatggagtgcacacatttacatgcaggccaaacatttatacacataaaaataaaaactaattaaaaaagaaatgtgtattatgagattccatattgtaaatgaagaaaccaaagaacagagaaagagaaaaaataaaaacaaacaaacaaacattaaggctttgtgctcaccctcatgccagaattcagagaaaatcaaattgaaaaggagtaatgtccatgttatacataggactggaattatccctatgctttgcacacaaatgcagcagctttacagtgtggatatcacaccacagagtgctttattgcctgggagttagttagctagcattcatgagtaacaatttactttttatgcgtgtccatccttcccccttacagccctccccacacacttttctccctctctctggctttaccattacagtgttctgtatgtaccagtaagctcattaaaaaaaaaatgattggaaatacgtttgatttttctttttccttgcaaagatcctagcagtgggtgctacagagagtaaaggttcaataaatgtggctggattaccagcatggaaaaaggtatttaaatagatataaataattcctaaagcctctaaaattatcatagacctttatgttagtataaactgccactttataaacttccttccagtcactggctcctcttattaaggttgtgtaatgcgttcattaggaaggcttcatttgactggaaaaccggtttgtaacatgagtggtcacattcagtcatagtagccatgttttattttggacaacagtttcaaacagggtttcaatcccctttgaacagagcttttgtagaataaaaaagcatttgttttcaaacttactaattatattcactaaatgcggctcatgttgtcgactttcccccactgtgagaattacaaaatcagtcataagattaaactcagaaaatgactacagcaaatcacagaatactaagccagctgggttcatttaactcctctatagaaacagtctttgtggtgaaccaagtaagacctacagctagtcccagaaagatacacttcttgtatcttctagtactgaaaatgtttacaaccacttttaattaatgtgaaaatcatcaagaagcacccttcaaattttcaaattacaaacttttattttaggtagctatacctctcaacccaacatttgtcgctattacagtttagtcacaattatttcacaaatatagttgtgaaacagtatgaattgagcattttgaaatagtgaatacttgtttgattaatatataggacctggagtgtatgtcttctacataggggggcagaaatttttcaataaagaagaacacatgttgagagaaaaaagaaagatgacttttaaatagttgttattgacagggaataccaatcaagactgcatttacaaagcactcttctctaaagaatttaataaactgaagatttgagaatttaatgaagttttcacacaacctaaactatagtgttgtaaatgtgctaatctaaaaagatgtaatcaaattctgagaaaacaaacaagtgttacatttaaagtattaacagcctcatttacacccatgaatataaatgaatatttcagttttgaaaatactcttaaataagctcactagtactatgcttcagactcttaaagattacacaaagggggaagaaaggaaaattaagctgtgagctgggttttactccctcaaagttcaaacattccttcttcataactacaacagtttgaagaagtacataaacaaagttaacacctgctatatttggtgtctctgaaaattaatctcacaacgagtcacagaatacatttctcacactgacctgttttaaaaaatgatttttaaaagatgttcagaggggaagaattttgcaagatgaatttttcaccttctgtttcgaactacatcaaataattgcatcacagtgttatttaacatataaattatattgctacataaatattttttaaattagtctattttgtttactggggattgaattcagaaccactctatcaagcaaacataattatgttatttttgtgttttctctctctctctctctctctctctctctctctctctctctctctctgttcctcccttcctctttcccctacacttcctctccctttcctctagccctctctcccttcaccattgctgtctgttttgtgaggcaaggtttcactctgtaggccaggttggaactcactatttagaacaggctagtttaaaactcctaggcaaccctcagcttttcaagtgatggaattaaaggtatgatatagcacactcagaatcaatttttcacttttgattttctggcaaagtatccctaaattgtccagattagcctgcagctcctcttgttgcttagggaatgctaaaacctgctatcttcctttgctcacattcaaaaatagctgggatccaggcctccactactaggtctcccccatttcaattactggcctatagagaatagtaacatcaataagtgattctaattctacaaaatgtgtggccatttagaaagagttgaggttaacattttagaattcacttatatagtcagagatacaaactccttacaccaagtatctttctactttaggcatcaatctgcataacagcattatatcaggtaaaggaaaacaggtattctactactctgaaatgggaaaagtgcattcattttcacagaaggccactttccaaagcccataatactttagtcaaaaaatcatggtaccacaatcacttatttccaccatatacagggttacaacccttaaactcagaagtgggatttattttcattttgattttgaatggtatgaatagcattagaggtgagggcttcatattggaattatgaactggtaaccaaatgccatgatcgctcaaaaaattacatgactaaaacaatctcatgacaactagccaatgtgcacaaatccacatgtacagtttaacaacccagctttaagatatatacttcataacataatgggaactaaacaactttagtaagagtgcttttactaacaaacaaatttaaccttatataactttctattaatttcaaagtttctagatttattgacttaagtgattttagggtctcctattttataatttcaaaatttgctgtgttgatttacatgaaaaactgtagggaatgacagttttaataactgagtctagaatatcaccaagagtatagtaaatgtagtacaacattcttttcatgctcaagaggatttagtggttctcatagatgagagtccagtagataaatacaataaagcacaattggtgtaactaaaggtcaaatatttcataagttgaacaaaggcaactatttaaaactgtcactgttttcctgcccttgtatcctgtagtacttagttatttcacatgtcttctttggttaatggtcttgcttcagtgtaatataatgtaatgcaggcaaactctcaaactgaaatgtttgtgtccagtggtcatgaattatgaatacattgtatggtgtgtcattatatactgacattttaaacatgacgtgccatgaatgaattcccttacatttgctgtagcaccgaatcgtatgtcactaattataaatcaaagacatgaaaacacattgctgcaaaaaatgccaaaggatggaaagttcaaaggactcatggggaaacaggatcttagaagggctatctaacatttcttcctattctatctaatatttttgtcacagtatttgttttataaagccaattataaacctgtatcatttatttctcagcaaactgtcaaacatctttccaactcaagtaatgataagcattgattttttttttttacaaattcacatctcagaaaggtaaaagtgtcagaaacaatcctaaaaattctgtggttgtctgaaatatatatttgaatattctatcattgaatgatcactcataagccatcaataaactactgagaataattttcacagtaagaatatactcataattgtgatgaacaaaatcattacaaaaggaagcataatatatatgttaaaaattaacgataaacctatatttaacccaactacgtggcattcactcacacctaattgagagttttctatacaacagacattgaggataaaatgtagaataagataccaatccaaatttaatgggctcagatttgatacagaaaaacaaaataagatgaagaccctagtggggagatcatgagaaaatggtcatcttcagttaaatgaagaagacctcaagagacaccaaccagtatcttggtctttgaattatggtcttagaaaattaaaaatacctttgaacctctgctattttctcatggtacctgaattgtctaataccctgtcccaagtattcacctctctgagcattcagattttatttttttattttgttttgtgttttaccataaacaaaagaagaatattagccttcattttatgcttaacttcaaatatttatgatacaattcacagcattttgaataaaaatgattacacattgtgaaaatttagaagaatttacacattactgaggtggactatgctttcccttgaactttttcctggattatttgcaaattttgctgtcatacaaaaaaagatatagtctttagggatcatatttaattgtaagtaatcttccatttcacaatgcaactaaacttattttacttccatttttacaactctatgatggtgaatgaaatgctttgatatttggagtgatgccaagtatagtttctttagcatcagaataattaatcattgacatgaccaactatgatatatttaacattataatttctcagtatactctaatgcaatcatttcactggacctaagaccagaattatacgaggattagtgtatttcctcacctacagatgaataaactgaagttcaaagagtcttagctgtaactacttggacaaggagtggttctgtaatacacactaagtcaaacagctactactgaaatgtgcagtcaaacacagagcaaagagccgaaaattacttgaagacaatacatccctaataaaatgtcctagacttttcactttgctcatactacaagaattttccaagctgatactgtgtcttttaatttatatgtatattattatgttattgcatatatatgtattactctattattacatatatattaacagacacagtggtagctttaaaaatacacacaataaggatatggtgttttgcctgtacatatgtctgcccatcataggcatgccagtgcctgcagaggccaaaagagggtgttagatcccctggaaatgcagtcgcaaagacttgtgagccacgatgtggatgcagggaatcaaaccaggggtctttggaagaacacccagttttcttaaccactgagctatccctaaagcctggctgttcctttaaagtcaatttctttagcttttctccattttctggttgaattatctcagatccttccaacaaattccatttttctcttgactcagaaagtcacttttggctgtaaactaataaagatccatgactaaaatactcacacagatgaatgcatagggaaagcttgattttttgaatattttgtttatgcatattatatatgctattacatactgaaaacaaaataagaaatgctcctcaagtacaacactggaattgattagaatttcaatgactaacacataagtatagtccaagcttgcaccataagttcacctacatttacatgggttttagtacactagcgcacattggtttggtgactcaaagtatgattcactactaaaattaaaaaagcattttccaatcattataaactttagtgttatttgtaattgtagctaactcacttgtttacctttacttcacaaaaatcaaggcagctgattttgactaaatattgtatattatgcaatgaggcatctcagataagtttaattacttacatcaatcgtccttttttcaagggatgaatattttaatgtgttttattggtttttgttgaaaccagtagatgttaattttaaaatcaaaaaaagagaaatttatcattagaaaaatttaggtgagaaatggtatccatttttgaagcaaaaccagtatttttcttgaagaattccctctgcaatttattaaaaaaatcaaaaaagtagacttttataagtgaaatttaacagaaattctagctaatcatgtatcagaacttagtaaattcctttttttgaaagattacagatctaagctaattaattctatgcacctcagtaaatttctgtcattttagatatttacatctacacagaatcctttgtattgtaggaaaatctttttattccttacattgtgggaatatcaaccatgtatatatcatttctctttattaatgacatgtatttcccccaatgtatttcccagaagataaaaatccaactgaaaagtgtgtgtgtgtagcggggatggggggataatattgtaaaacctttacttctttttcctttagaacacctattactacatgatagtatttcccccaagacggttttttattttatttgaagttggcaagaatcttttgctaaatcctctgagcatacctctagtgatagatgtcagatcagtgctatatggaaaaacttttatttgacaggtagatgacaggaagaaagctctctccaaaataggagacctaagaataaaatctttccatgagattaatataatcttttgctcttgtatataagtaaattgttcattcttgcttcaagataatcacttcatataataaatctgaataaggtgaaatgaaggcagttgagaagtgaagtattaaaattacaagttagcttaagatatatatgtaaattaaatgtaaattagatatataagtacataaatataaattcagctggcctgaacaaggggagagcacatcaaccccagatgctgtctgggaggccagtacccctgaacatggatttcaatgaggaggcttctgcactccagggggccccttgtgatggattagtatttttccctggtgtaagaagggactttgagagcccatctaaatgcccttaccctaaaatgagattgatgactactttttatgccatcctagagccctcatccagtggctgatggaagcagacccggacatccatagttatactctgaactgaactctggaacttcgttgaagagagggaggaatgaagatcgaaggggtcggtaccaagttagagaaacccagagaaacagctggcctgaacaagggggagctcatcgaccccagatgctgtttgggaggccagtacaggactgatccagacccctgaacatagatgtcaatgaggaggcctctgcactccaggggacccctggtagtggattagtattttccccnnnnnnnnnnnnnnnnnnnnnnnnnnnnnnnnnnnnnnnnnnnnnnnnnnnnnnnnnnnnnnnnnnnnnnnaaaggacccaggcccagcccaggatgatgtggtggactttgcggagaccctgttgaggaccctaccctgcctggggagtggagggtggatggggtggccaggtggactttgatgatgtggtggactatgcggatccccagttgaaggcccctaccctgcctggggagtggagggtggatggggtgggggttaagtcggggtgggagaggagggatgggggtgaggggagggagagggagaagggatcggcatgtgaaacaagcttgttcctaatttgaactaataataaaaaaatgccaagttaaaaaattacaagttagcttaagcaatatatgtaaattagatatataagtacataaatataaatttatactttatttaatatgcatctttataataaaatacccaaagtatagattcacaaactgcacataaaaaatacagtcaaactgatctaattagggtaggttatatgagctataattgaaagaacaagaccataatagttttaccctgtaaatacatatataattattctagtttattccaagtattaccttattcttcttggtgttaccaaatgaactaatgtgtttcccactaccagaagaagagagaataaaactattcttgatgaaaatctggtatttgcaagttatctagtctattttgttactgttattattcttataactaataaaaaatatcatgagtaaaaggatagtcaaaatcccattacatatgtcatgctatcacttgcacttatgtgtgttacaataaccacaatcaaatcatttttcatacatattcatatgtaagtttgtgtatttacaccttgtataggtcaatgtatgaataataaagaaggtcatattcatttgggattcttgttaaaaggaatgtctagaaggagctaaacttctgcattattttctgatctgagaggagaataaacagtggaagcatggggagatgtcaaagaaagactacttctctccagatgcattttcatctcaagcttccttaaaggccttcacctcagaatctgttcagttgtctgtctataacagacagatgttttattttaaaaagttgagttgatgtgtctggacatataaaatcattttgtggatttttggtttcttaatctccttttcctaggtctcaaaataatattcaattgcccagtcaaagcagtaataatattatttcatttttacagttttaggcagataccttaaccatcagtgagagcatattagctcaatgctacccagaaacaaagcgttttgttttcatacagcacaataatcgaatcatatccaaagaaaagtaatcgaatcatatccaaagaaaagttcctggctcttttactcatataattaacctcttcaaatatttctagagacataaaataagcaaaaagagagtaaaatatgaggtaaaatatattttacaaagacaaatttggtattgtctataatctccagaatgatttaatcagagggcatgattaaaaaagacttcatagtattttgaattttattgcaataaaattataaaatatttattttaatcaaggtatagtccggagttacgtgatcatattcaatcctatggcacatgatttggagttgataatttgtttccatttatatatcatttcagctcacatatcaaaaaactactgtttagaaatgatatcttaccttacaaaggaagttgatcttgaagcccaaagactgggcattccttgagcctgagttcatgtagtttcctaccaaaagaaccagctctaaaagtctattaaagctttcacttttcttcagttcttcacatgcaagagttactgacatgatgcttggtttgatgttgtttacatgttcttcaaaggtgagtttgaagaggatgcttgtgagacgaggccgtaacattttcactgagctcatctagaagataaggagtctctatgagaatgtctatttaaaacgttctttcatctctctgtgataatttcataagcaatattgtaagttcatgcacatagcctattctcactgagatttaaaatacactggttttgtttgttttcagctttccaagggagagatttaggtaaagttttataaaccagaagcagtcagatttgataaacaataaacatcatcatggttataacaacaaaatacagctgactgtgaacagtttttccatgttaattacaaacttttggccacatgtaacatacaaatagccaaaatttgttcctaaaatgcataaagttgggttgagtaaatagctagtcttagacagtgagtgtacacaatggtagaaaaacataggggtaatatttcctaagaaattatctgttggcatagtgttgaaaccagaggagtgatgaggactaatcgtttaataattgttcaacttacgacttctgttcatgacatacatgaacacttaaatatatcccaaagatttttcacctgcatgtcagatgttagtgttaatatatcattcaaaatttttatgttggttttcttcaaaacagttcaatttgggttttaattacttttttatgtcaaagtattgatgcacattcaaaattcctcttggtataactccaataataattattttgaggtttgaatttcctttagctcaaaattatttaattagtttccacttaccaaatgatatctgaaaaggtgatgggtggagactagacagacacacaggagcattttataaacacacaacgaaattagtgaacatgtttaattctacttaatttgcatgtgtattttagtctcttaaatacaaatgctgagcacagactaggcacagagatatctgaaagcagcatgaaatttcactgaagccatgaacaaaagaccttttgtttcaaacatgtcttcgctttgtatccaaggctggccttcaacttttgaagcaacagatttaaatcacaaagtaacttccactgtgtcccatgttcttaagttttgcatactgttctctagcttttgagactatttggaaaacttgtggaacctgtagaagtgtgactcagcgtggggaagtgagtcaatggtgctgagtttggaaaggtacaactgtcacacactgcttcctggtctactgtgttgtgaacagcgtttgccacatacacccactgccatgaacagatctgccctgccatgccttccctttccatgatggactaaagtctgaaaacataaaccaaactaaaacttgcctactttaaatcagttctgtcagatactttgtcatatgtatgagaaaggtaagtagtacaccttctaaagctatacatgaattattgggttaaccatttcagctctagtagtgaagcaacacatttgtctggctctcctttgagattaacttgcctattgaccatgggcatctgcttctctctatggaaattttagcttctaagaattctatgttttcataatttttccaggcagaaatataaacgaatggatataatattgccctgctacagtactcacatagcaacttgccactatggattattttgtttaaagtgcacacattattcgcatgtttcttcagcactctcatgacaagtacaaagcacactacctattttaagaagcttagatatatctagaaaatggcaacacaggcacatgaaaactatagctagcaatataaaataggtccacaattctagagaactttaccaatgggggacaatgttaaattcctgagactatgggggcatttccttttcaaaccatcacacgtacatagtgcagtgcaatggcagcagattgttcctaggatgtttttgagaattaaataattcaagcagaaaaatttgacagaaaatcctcaataaatggttgactgctgttattcctatactatacttaataaatatacttgttaactatactatttctgctaaagacagtattaaatgaataaaatcaaataaactcaatactctgagtttataggtcaagaaattaattatggagtcaagacagaataaaatatcaatacatatgtgtcattagtaataaaccaagactgaaagctcaggcatactttgcaaaggttttcatttcttgttgattctggacaaagggcactttgattaattgacatctcacccagaaggtagatggcatcatccatttgacaagggtgcaagaccaaatcaaacaagacaaagatcctagggaaagtctgcatttaacacatggtctcccattggtaaagctgtttagggaagtttatgaagtgtggctttgctgaaagaagtacaatgccggaggaagactgtgtttattgtctatcccaacttgttgttcactctctaggcttcattactgtggctgaatatgtgtgctctcagatttctactattgcccctcctgatcatcaaggagttttacccttatggaaccataagccaaataaactcattgttacaaaaatctgctttgaatcatgacattttatcacagcaacaagaaagtaactaatatatcattatgatacactgtccatatgcattattagaaaccagactggttgaatgatgagtggcatggaagccatcaataaggtaggtataaaaatgtcccaagaaacaagtaatgatgtatactattggcaataggaatagaaaggaaaagatttatgaaggagaaagaattaaggaagaatcaacagtacttggtaactaaccagctatggaagaagaaaatcaaacaactgtttcaaggctttaatttggttattccaatgatgttggaattaatgacagtttaaagagagcctgaagaaatggcttagcagttagaagaacttactgttcttgcccaaaacccaagttccctcagaacaagtggctcacaaccatgtataactctaatcccagggtacctgttgactctgtcctacacccatgtgcctacacatatatgcatgcatacgattaaaaacaaaaaaccttcagaagttgaagtctgtgttgatgcagtattgactcatgtttggttattttgtttcagggattgtggggaaatgaatgtgcttctgatctgtcatctatacaccagtaagcaaatcaaagactaagagggtagaggcaggtagaatactgtttagcaacaatgtcagtcaaacataatttcctatgtgaaaatagtcttcctacttttcagaccctcgatttccaaaattgaaaattcaggaaaatttctgtgactgttttctatgttgtaggaagatagaatcaatgatactaggtgtattcctgttactacagttttttaaattatcattgaagtggatttaattggccattttcttttgtgtcagtagtcttttttttttttttttagtaacaaagacactattagcttctgcttattaagattctcaagcttgaaataatattccaattactatcattggtcacacaatagtacctaacatcaaccattgcccacattttaacatgtcttttattgacaatgtttaccattcaaactcaagctttctatgtattacacttaattatgttacctatatacttttaaaatgccctaacagatttctctaaatcctctaaattttaccctctaaatggggtgcctttatgactagggaataatacagattatttgatatagagcttttgtcattacaatattatctggcaaaattttaaatagaattagatttgttatatgaatagattctttgggagacaaaatcactgaagaggcaagtgtgtggaaaagaatagagaaaagagtcaaattctgtaccttgataagcactcagtgccgggtcttgcatacattacatattttaatatttgctgactgatgttaacaatagtccttagataaatatccatttccagatttttcatggagagacagattgtatattgaacaaaattaagaatgggcaataatttattttcccctaactaattacattatttatgaggtcaaatttgaaatacaaaagaattacttttgttgaattgcttggttttagatgctaatctatcaatcaatatgactcaggaaggaactgtacagcagtcttagcagctctttgactcaccatgtacaccaacatttgatacatggcaggtgatgataaatgatagcttattaaaaataaatgaatacattcatttgcacgaactggaaccactagtacattaacaagatgcatataagaaagaagctagaggtggtgtacaggcaggcctaaaatcccagtagataggaagtagaaatagaagaattagaagtggaaggtcaccctcagctacaaagcaatttcttgtctagccttggttacatgagagtctatctgaaaaacacacataaatacaaacaaagaatatataacaggaaaggtgtgaagaaggctaaaggaccttacataatatcatttgataccaggtagttaaccctagaaatactacccagacccaatataatctttttgtttgtatttcaagacagggtttccctgagtaatcgtggctgacctgaaactcaggttagcttcaaattcacagagattcactgcctctatcttcctagtgctgggattaaggtgtgtgccacaactgcatggctcaatataatgtattttaagcataaggttcaagggaaatcttttagtaattcccagagaaagagagaatcaatatttatgtctatattttccatgcccctgctgttggttgccaaggaagaaacaagaacttttgagttttacagccatgaacccaaactccagtcgtgccaatttatagttatgtgaccaagtgcaaagctagctaatgtttctcaggttctatttcatcaacagaaaaatgtattcgtttcattatttatgcatgttcagtaggacatgaatgagatactgtgtggaacatgtctgttttatcaactaacaccatgtaagcactggaaaaaacagctgtacttagctttatttatccttagaaattcctagcaagaaggacacatggtcattaatgtgtctgccaaatatgaagtaaagtctttttggatccacaattaagcaatgtgtgtctgtggtaatcaatgaagaatgtgacttattatccactgggtagactccaagcatcaattactatgtctagaacacatcaacaggcgtgtttcagtcttaagtattaacttttacagtgagaccaatatgcattgatagacaaaagctgaacagccatcggagggttttctgtaatagcatggatagtcaagcttagaaataataggaagcactgagctacatcccaagatacatacacagctattaaaaggcttgtgtctcataaaggcatttgagtgctcctaagtgatgtaagtaagtaaagcagaaactttgctgaaacgtagctttggtatgttgttgtggtccctcgcagcattttagttgactggcatcttttgctttataattcattccttgaaatgctttgggatgctgaccagggtgttgtattataaagggatttatttgtattgcaagttacttgtctatcaaatcatatcaaaccattctcatttcttcaactgatctgcgctatattaaaaaaagtgcattgacagctttagtgagagcactacaagtaggttatttccccaaagagttaggcacagtttcattgatataatttgaattgtatacacttcataactataaagctggtgaatatagatataataccaaaatactacagaaatgcaaagaaaaaagataaacagcagttctaaatatcatgtatgactgaagaaaaggtcgtgaaacctttagggttattcaaatcaccttttactaatgcctatcatatgtgaagaaactgaaatgttagacccttgaaaatagaatttgttgcaattattaggtggatatcaagaaattaggaagcattattccctgaatttacaaaatatttatttgtattttactatagtaaagggaatgaatttggtcatattcaaggagggtttttgtcagcttggcagaactgccagtccaagagagattcagaggcaatgactgacaaaattttgtctggaattataagaatgaagcagatacatttgagagtttctactaaatgaatacttttcttatcttctaatactcaataagttcttcatgggcagggactctcctattcattgtttcactcgctgaactaaatccaatacctgaacaaaataatcaatatgagaattcctcttatatgtaggaaacgggaaatgtttgcacgttagctgtcatgagagttgagagccatggttaatctgtgaattgaagcactaaaaaacagtgttgaaaactgactctatatcagaaaaataatgatgtgctgatagagaatatttccccaaagatagtgatgtgtggaaattatgcattgagaaacatctactaatatttagtataaaacagaatgtaataacagtgtctgctcccccaaagacactgtaaactcagaggaatcacactgagaagctgaacaagaatttcaaaatattcttgtcaaaacatctagttgaggacacaaatgactattaaaactactgtggagctttgttattctactaagcaattaaagagataaaggaaaaaaataagagggtgaaatcttgatatttttaatttaatttaaattaatcaagtgcagaatttattgacagccatcaacctcctgtgaatattcaattttcaggttgttttattttaccttgttttaatataaaagatgactgaaataaacaactctgtcataagcatgaattaatatgagaagttactgaaatgaacagtaatataaatacagggacttgagaatgactcaaggtgaatgtttttttacttgatcaaaaattattaaactggctcttttttgtgacaaaatttctctgtgtaacaaccttggcagtcctggaactaggtctatagaccaagttgtcttcaaactcacagagatccccctgcctgtatctcccaagtgctaggattaacagcctgtgccactactgcctggctttcaaactggctttatctcagatagcattaaccacatcaacaagagctagaattcatatgtgcagaaaaatgaaaacagaaacactgaagcatcacaaagattgtttctaatttttaaaaaggaggaaaaaaatgaacatccaggactcttaactgccaaatgaataagcagaacaccctgattgcaagcaagataaaaaatgttaatttgctgggcgttggtggtgcacacctttaatcctagcactcaggaggcagaggcaggcagatccctctgggttcgaggccagcctggtctccagagcgagtgtcaggataggctccaaaactacacagagaaaccctgtctcgaaaaacaaacaaacaaaaaaagtgaatttttcttaatgaatatgcaagcataggaagtaatgcaatattaatgtcatctaggacctacaatatttttctaaattaattgcttttgatattacataggaaggggaaagcattttatcaatcccctttccacctggttaagctctctcgaacagggtttataagctctttagaggctttaaaacaattaaagcaaaaggaggttatagttgtatttctctatccttatgccttcacatatttttgcaaaagaaataagaaaaaaataattgttccatcagtaatatcatataatctgttctgttcattaaagatttacatgtatgaggctattgaaacatctttttttttactagattatagcttgacaatgtttttaattgaaaaatatgggtaatttttaagtcagaacaacaaaactactgattactaagagaactaattattgccttctttcctcagaagacatgctagtctaatagatatacacagtatgggtctccatccgcagtgcaagacaagtgggaatttccacagctctgaggtttgagaacagctgaactgcaaacacactctgaagcatctaaaagctccagctggggcttttggctgccagagctttcaaagatctgtgcttttcttccagtaaaggtacagcacataattacaatggatgtaccaaattcaattccgtaggaggtaggttggaagacaagtcagtgggaagttatgcagccaatctgcccctttaaagaagattattgatcatagaaggtgtagtaagtagcatgtctctcttgctgggaggtcggcctccacacagagggaagatctcaggcttgatattgtttgtttgtttctgcttaatcccctcctatgctttttttttttctcccagttgatagcaagtgattataagtagacccaaggttgtgacagttaaaaaaacagttaaaaaaaaaaggttaaaggaagtttaccaactcagagactgactcaggtaagctttattttctctccttaaaaaaaccctacccagaaacatgtcatttcttccgattggtggtaatattttagtcaatgtaggagtaatcatttgtctggtacatgttttgccctagctgatatgattgttatctagagagatgtgtgttaatgggaattctacagtgtagtggttcaaagatagtgaaataaaagcaactataaaatcctcattatgtaagaaagcaagacaagaaaataacacacacacacacacacacacacacacacacacagagagagagagagagagagagagagagagagagagagagagagtaaatctgtcaatgttagaaaatagtatatagattgagagtatgagaagaatggaaaaagtccattcgactttgtctctaggcaaagacattcaacaacaatttgacagatagatacatatcatgaataacatcagcacagttcacctacttatagaacttatactctaagagaacatattcaacaaataacctcacaaatcaataataaaactattacattctagaagggaatttttaaaggaggttctgagagttttacagatagacctacttttgacagcgacacaaatggcataattactgaatttaagctaagacttaaaaataggttttataaaggcaggtaaggaatgggaatcagagatgatagcacgtgcaatgattctgagaaaaacgaatgaattcaaacacataaaaatggaattcaatatggttgaggtacaatgaaaaagagctcaggtcacccaaaacattaaaactaagcaaggttgacacatgcgaggtcaaaatgtgcctgatcacccaggactgtggcgatggctagggatatgtttcaatgggcaaagtgtttgctgaataaacacaaggacttaaattcactccccatcacccatgcaaaggcacagatatctgtaaaggaagcactgaggagagcagggaaggcaaatcccagtgacagattggccatccagtctagctcaaatagtgagtccaagttcagagagacactgcccccaaaacaaaggcaaaaaatgacaggaaacagatatcctgatgttgaatccggtttcaatacatgcagacatacataagcaagaacatccactcacatacatgtgtatatactgtatatacacaatgaaggatggaaagagggaagaatggaaggaataaaaataaaaatactggggcattagtgttttgggacgtaccaaataagatgcactataaaagactcccaatagatgcactaagaggagactgattaggagagtagctaaagataaaagtatatggtaacgattacagggaatagtcctgctgcctcagacactggcagtggcagtacagatgaagttcagacctgaagtatatttcagctgtgagtaggaagtagttaatgacctttccttaatcaagttcaatgcatagtttaaggcagaatcctgattttactactggttgaacagttaataggaagcaaagcaacagagagtaagtggaaacttctgaagaagctgatgataggtaacagaaagagggcagtaactagcacgatccctgggtcagagaaacattttaattcaaacatctagccacccattttaggcagcaagtgacaagatttattttcttgaagagaaggccagagtagagtgacaaattgaagcagcgagggaaaaacacaagtatagtaagcaagaaacaatgctgtctggaattagatgggttagtaatacacaaagcagacatagggaaaatgtgcatgtcctagagcgtctatctacctatctcatcacactctcccccacctcccttcctttaggaaatcacagtacctaaaagcacagcctgtgaattctaactggttcccacatctactatttacattgaagccttggaacacttgcctgggttgggttggcctcagttcctcagcagtaggtcagagataataacattgtcaacctttaccttataaaacataaaagaacatgaatatgttgactggcttgaccttgtgcaggcattgcacaagtaaccacaggtgctgtgagttgatatgggccctgagaagttgcccacacctcacagggtaactccacagccatgtgaaaatatagacagcattaattgcactcaggggctattgataacaaaaaggaggacatgacgttgacaaggagatgagggttggcatgaagggggatttgatggaggcgacagtggacagaaatgattaaaatttggtgtgtaaatgtatgaattttctgaggaataaattaaaaatattcttgaaaatatggcccacataaaaatgttagcacaaagtacaagttagtaagcttttgctatcactagcactgcaatggaacattagtaatggaaactggccctctccttttctgaagtttcacaaagaaataaatttacaaaatggaggagtgtggggacagagctctattctgcagtacttgcctagcaaatgggaggtcccatgcttagtccccagagaaacaacaacaaatagcattaatccaagaccagagaccagcttgaaatcctaagttagaaacgagccagggtgatgtaacaacaaagcaactatggaggcagaagagacacaaagaggtcctgaaattcttttgttatgccacttgcaagaaagattttgtagtagatgaaaagaatagattacatagccgggcgttggtggcacacgcctttaatcccagcactcaggaggcagaggcaggcagatctctgtgagttcgagaccagcctggtctacaagagctagttccaggacagcctccaaagccacagggaaactctgtcttgaaaaaccaaaaaaaaaaaaaaaaaaannnnnnnnnnnnnnnnnnnnnnnnnnnnnnnnnnnnnnnnnnnnnnnnnnnnnnnnnnnnnnnnnnnnnnnnnnnnnnnnaaaaaacaaaaaaaaaaaaaaaaaaaagaatggattacagacagaagaggaaatgaaagacagaacggggaagcgagaggttgaaacatatattctaaagtcagggaaacaacgaagggttgtgatactgaaatcataaagataatttttaatatgaatattaaatactaagaatgggtgaagaaagctgaggacaggggttttcctaacttgggggttcttttattagttagaagaattctactttccaaagatatggccccattaggcagctaatataagttcaagggttaaatagtaatgatagtatattctcacagaactattttaagttgctattttagtcatactttatgtttctttccttttaaactctgcctcacatttttatctaaaagagtgcttataattccacaaacatttactacctattttacacaacagactgcatacaactttaaaagactaaggttattgtttattattactaattaattattaaggatattattatataatgaataatatatttgttaagaagagcgtgcctaacctttatttagtaagtctcaattgatagacttaggcaatttacgtagtttaaactgcttagcaatgtagtagattctctctgacaccaccccagcagagacagagcaaaagaaagtgagagtacataaggggcgtaggagaattcatgtatataaagcctgaaatatttatggttatgtgcataaacaagaaatctcttccattttctatttttgcctttagttcggaaggtatattgctttttatgccccccgatttcatttcctctgtaagttaccaaggatattccttgtgaaggacttgctaggcatactaatacatcttccaagataaactgcactcaggaaaaaaaaatggtttctgagaaactgtgtagtatacctactgtaaaactcataaccatcatgatgcagctgaaatctcagatggtgtatagccctgcttcaattataagatggatctgagctacttaggtttcaagtgtggacttgaggctacaaattttattatttagcactctgctaaagtgccaccatttaataaataatacagagccaattcagttgactaatagatctgatttaaaaataagagaaatatgtcccccatgtccattatatgctctatttgatgcccaatgtgcttgtctagtttccttttcaaggaattgacaaatctttctacctcaaattaggcaacagcataataaaacaataaaacagttttaaatatggacaagagattattgtatatgctaaaaagaacacactcactccaatctaatagagtttcatatggacaagattttaaaactgaagtaggaaatcagatcaaatctaagttgtaactactttgaaacattatggaatattttggatgaagctgatactacttgaaagcaggtccaatgatgatttaaaatcctttgtttacaaacgaaaaacaattaggaagccagagtaaaccagaaatacacataggaaataaatctgtcctgaacaccttagtttaaaaaaataccttctaggttgggcgttggtggtgcacgcctttaatcccagcactcgggaggcagaggtaggcggatctctgtgagttcgaggccagcctgatctccagagcaagagccaggataggctccaaagctacacagagaaacactgccttgaaaccccccccaaaatagcttttaggggttggggatttaactgagtggtagaatgcttgcctggcaagaacaaggctgtgggttcagtccccagctctggaaaaaaataggttttattcaaagaaactaatttcaatgtcctttatatttctttatggtcaatcatttgaatagcaggcttgtggtagattaatatatgatgatatattctttatactaaggcattctgtgccatttcaaatgatggggataagaaaaaatgattaaattacataaggtacctttttaagttacttgacttaatgggaaccacacattgcaagttttcaattgatcattgacagtctagaaaatttgaaaatatttatgatatttttgatacaatatttattttgaaaatagttgctagttttcttttttaaatttccttaaatattattaattttatttcagccttaattttcagggggctaaattctaacattctgatctaaagggaagaaaaacagccaatgcaatacagcatgctattttgcatgtattaatatcattaaatatcagcattgttgaagagaatatcccataatgctttggtatttttttgtgaacttaaaaagtaacttagttacttttcaataccacaatgctgaaggtaaaggctttttctaagtcaatattatatttaatcatgtagttataaagtaaaagaaatcaactaatgtctttcttatgtttgtgagaagtgtatacttaggcctttgtgatcaatacataccacaacaccaaactgttctggctcacagagatcatcatattcattcttaagctgtgctagttctttgagtatattctgctcagggagatgtttgacaagattctaaaaagaaaagcataagtattagtagttagtatctgattggtgagatgtttaagcatacattagcaactcaactaagcagattaaaaaacaaccaacctattaaattaagaaaaactgtatataaactagctgcaaagggaagttgtgccactatatgaaagactcataccttctgttatagctatatatcacaacagacagatgaccctgtcctgctgattggttaatttcaaccaagaataatctctgagatacaatcagacatactattcaatctggacagctgctgacccagtcaaattgctacataatcctcaaagttagggagttggtgtagaaatgctatagttaatttcttaagaatcatcaaatggttacactgatggctaagctatttcattccaaccatgactattaacagtacacatgattttcagttttccatatctttaccagctatgatggatagtttcatgtcaacttggaacaggctaaagtcaattaagaaaatgcctccaaattatctggccgtaggcaatcctataaggtactttcttaaggagggcttcatggaggagtccctgttcattgtgggtggtgccgtccctggattggtggaccatcaagaaagcagtttgagcaagccatagggatcaagtcagtaagcagcacgcttccatggactctgcatcagttcctgcccggttagaattcctcttctgactttctttgatgatgaacattgtgttatgaaagtttaagccaaataaaccttttccttaccaatctgtttttgacaatagtgtttcatgacgcccgagacagtagcatatgttatttaaaaaaaaaaaaacattatggtatatgtgaagcagtgatttttgtatactattctgaagccattttaaactgggaaaaaattgacattaacacagaaaacagggaaactaagtatacaacatcacatagaagtgggattttatttcctccacttatattttcttttcttccattcaatcctgcctctctactaaactcttgacatacactagtgtccatcatattaaagctcaaattttaaaataagagtgacctatgatttaaaataacatggatataaccatatatgcagatgaaatctaatggagctgttttcattcatgactataaacatttttatacaaagaaaagtaatcactaaacttattatttccattaaaaatatatttttgtagtatgaagaaaatgatggtttgtacatgccaggcaagaactctacctctatacacacacacacacacacacacacacacacacacacacacatataacacacacacacacccttttcaaaatttgagaatatcttaattgtatgtatgtatgtatgtatgtatgtatgtatgtatgtatgtatgtatgtaattttggttttttttacacagatacatgtaccatactacaaggaagtcagaagttaaatcctgatgaactggaatcagaggcaaatgtgacctgcatgtttcaggttctgagaaatgaactctagtgctgtgcaagtgcagtacacagccttaaacactctgaagaggcatagctccagccccatatgtaagctctcactagaaaaccctgaagatgtaaatattagaattagtgctgggcagtggtggcacaagcctttaatccctgcacttgggaggcagagacaggcagatctctgggagttcgaggccagcctggtctacaggagctagttccagtacagcttccaaagccacagaaaaaccctgtctcgaaaaaccacacacacaaaaatagaattagtaattcttaaaatgtgtctattactgtttttgttttgttttatgttgtttgttttctccatgacaggctttcactatgtagctctggctctcctgaaactcactctgcagaccaggctggccttgaatcacagagacccacctcctctgcctccagtgtactggaattaaaggcacgtgccactacctccaggctactggtttttgttttatcttaagtatactgttaagaaaatcaaagatacacttgggtaacatacttttcactaagtgcaactaaattaaatagattaaaagcattatttaaattatgaaataatttaattcaacattttaaaactctccatttcaatgtccattttctgtgttttattctaacccttatctatatgtcataaccccaagaaaaggaggatagaaaaagccatgctccatgattttccataaaacatggaatcttggctcttagaaggcttctatatatcaagaggtgaactcttcttctatctacgtttttactcccagagtaactttacacaggaaatggggaaaatcactctcagctgctacatgagaatggcaaaattcatttggagaatatataagttgcttgcggaggtgcctagaaatgatcaatattgaaaagtcttctatggcagtggccaagagcaattatcaattacatagaggcatacgcaaacagataagaatgttactgcaaacttcatattatctaaggactcttcacttgaaaaaaacaaaagagctcgtgaatttaatgtttcattcacactgcaactacttctggcttgtaaataaattgaaaagttagattaacagttcacataaccactacatgtgctatatgggggaagtctaatcatagtactaagaattggacacagacaaataacaaaaaaaaaacacttgaaaggcaatagattctgacaaattattggctgatagacaaaggtcctataagttttaaggtatgatccattctatttctttctcccctactgctgcttaatagcatgccttttctccttcaactatttcaaactttgtgtttgaaagatcaattctgggtgagtatgaaaatttcattctagaaaatgtcagtgagctgaagtttactaagaaaacaacaaaggagaaagaagtaagcatgccaccaaatgaggagattttccccctcatcttttatgtatcaccagttcagtttctgataactgtcactgttatttgaagaaatttctcctagaagaccacaggcttctaacaactttttacatttatgcaattactctataatgcttccaaaactttatttcttttaaatgttaattgcacatgtaaaggttacttaagtaaaggtattgaaccatactgtcctttccttcttgacaaaacataacctttctttttttgtcttatatctcattaagtcattttagtagtagagaactgagttaagttcactctgattaactctatcatttaccacataaatggaccagggccaatatttcttttaaaaaatgaattattgttgtattttctagccatctacagatggataaatgaaaagatacagaaattgatttaaattctattgataagtatacatgcacagattaatgaagacaaggagattttttcaaacacttggtaaaatttctgtcattttaccacacaactttctccacttgcttgaacaaaaaattcaattccttaaatattatatgttattatggcatgtttttcaacactttcttatggcatacagctaaaagagttttgtaggcatgtgttcatatgtgctgggtagttgtacaacaacttgaaacaagctaaagtcatctgaaatgaataaacctcaattaagaaaatgcctccataagaccaggttgtaagtaggacattaaggcattttcttaattcatgattgatggggaaggcccagcccattgtgggtggtacaatcccagggctcttagtgctgggttccataagaaaccaggctgaggatcaagacatgaggatcaaggcagtaagcagcattcctccatggcctctgcattattcctgtctccagattccagccccacttgaattcttgatctgacttccttggatgatgaccagtgatacagaagtttaagccaaataaacccttttctccccaatttgatttttggtcatggtgtttcacgaagcaatagaaaccctaactaagcgtactcgaggcttttatattatattcctgtgctcttgatctttgttcttaagggtagatacaaacacaactgttttcctttaaatagtaccaaagcctggtactgtcattattatttgtttaaatatgtgtttgccttttaataccgcatgccttctatataaatgtcacattacccattaggtactgtgctattggaggattacaagtttcaaagggacatgtatgctcctgtgaaaccatgacaagcttaaagcaacagcagtattatcttccaattgacgtaaaatataactcttctcagaaagtgatggggcaaatatttccttttgaatagaaatacccaatatctgtgcaactcttatagttacaggacaaatataaattgaacaaatataaagaacttatggttgtttgaaagaaaatggctcccaagggaatggcactataagaagttttggctttgttgaagtaggtgtggtcttgtcgaaggaagtatgtcactgtgggggcaggtctgtttctcaagcttccctgagtgtgacaggagttgacttgctattgtttgcaagatgaaaaacactctgctattgctgcagtatcaagtctgcctgcatgctgccatgctccccttcatgatcataaaggacttaatctctgaaaatgtaagtgatcattctttcaccaagactggttacatacacagcttctaagttttcaaaacaacaactgtcatttcaaccatatttgaagttagcatgattgaagtccttgggtcaattcccagaaacaaatgacagtaaacaaataagcaaaaacatcaaaacaagcctagacactgagatactactagtttatagccatgttaattctcatatgataaaaataagatatattaggacacataggatatattagcatatattagttttcaggaaacactgcaccactactcagtaattccaatgatacaaataatctattctgaaaccctagatatagtcctcataaactacagtgtgtgaaaataaaatcataggcaaaagtaaacatagacaaaaaggccctacccacaaggtttgagtcagtaagtttgagttatggtggaaattatatacttgaacatgtgtgagataaagcacttgaaaccatcatatatagagaaggtttgcaaggtttagacaaacagcatgtacacaaatattgaagacaacagtattataccaccagtgtttatgataatagcaagtaaaagtaacaataataaaataatatatgtgttgtacttactttttacagagcatttgaaaagggataaaacctaaccatatactacagttgcacattcatatgctacaaattcataaataataaagtggagccaggcgatggtagaacacaccttcaatcccagttcttgggaggcagaggcaggtggatctctctgaggtccagaccagtagggtctacaagagttatttccaggacagactccaaagctatacagagaaatcctgtctaaaaaaaaataacaggaaaaaaaagaatagactgggaatgatgagcatcagtttgagggtcatggtttcttctggagaagaaggataatcaatgtgcttcataagcactggtcctgtgggcattgttactttaatgagccagtcaatgacatgtttctactgaccaccactgtgtagacactatccttcacatctgcaaaggatatactcacttttcagtttgcttttcctctgaacaacaatcatgaaggcataaagaaaactacttcaagtcgaatcttgtcagggttgttgtttcagaaaataactgtcaacatgtttatagtcttataaaatatttcacacatattcacaaggggaaatcaatgacttaaaaaaataagagacaatcacatgattttgagcaggtcatattaccggtcacttagttacatgatgaataaaagagaggtagtcaaacataaattgaaatagtgctgcaaaaaagtccaattttgtattgtttgaaatatttccacctcaaagcaatattcaaattatctatgaaaataatgcataaaaagtgtatttggctaggagcactgattttctaacagatacaaaaacaataacagtcttttctgcaatcttcaaaataggattgtcttttcaactagcaatatgtgctcatatttataaatatttatatggctaactcttccaacactctaccgataaatgcaaaacaataatgatagatggcatgtacagatgatttgaaatatatgccaatgccaagtcccacataaaaagactgttacatatacaacagagtatacaaatatgcttgttaactcatgactggttttctatcggttaagtagcttcttagtcattcccatgaaagcctgtcctctttagcaaagctgacacaacactacttgtgaaaaagccttgtcagaaaatcataaaatgagttaagagacatccatgtttgggatctaagaagaggactggcaaagttttcccaaagcttatttgaaaaatcaacaacaaaagaaacaactcatgtcttctctgttcctgtccaaaaatgataagaacttcctcttgcatgtatactgtttagtattatactatacactacaaatgttcttcttaagtttagcatatcaaataacaacagtttcccaatcagtaatttctcatcagcaacagataatcacttcatctagggtagttatgcttttatttaaaaattatcatgcataccaaacctaagggccgttcccatagaaatgacttttacaaacacatgtgtatgtcattaggccacaactaagcactccaaaataggatcctaaagtactgaacaactgtacacataaggacaaatgtcccctatgatgcatgtgaacattcagagaaaccaaaacctgtaatgcttaatactgatttgttaaccagtcgagatctattatcactgaagtgacaaaggactgtgcatgcctgtaagagatgctttgttcccggttaagtttgtgagctgaaccattctctgaaaaggcttcccagacaaaaagagaaagctagatgagcagaagcacccatccctctttgattattgattctgaacacaatgtggccagatgcctcggatttttattgtaatgcattccaaatcatgatggacttttcctcaaaatactagtcaaaataaacccttctttccataagttgctttggtctggtgtatatgtgtgtgatgtaaatgtgggtggcctatatgtatgtggtgcatatgtatgtggtgtatttttgtgtggtgtatgtgataatgaaacaactaacaaatacactgtctatgaatgaaataataaggaactgagcaaatactcttccataacacatatgagccactatatatatatatatatatacatatatatatatgtatatatatatatagtctctccattattgcttagattgttagttggggggtcatccttgtagatctctggaaatttccctagtgccagatttgtccatctataatggcttcctctattatggtatctcttttcttgctctcctctattctaccccgactcaatcttcctgctccctcaagtccacctctccccttctctttttcctaagttcctctcccctcccccttctgtgtatatgatttgtcttattggttgataattaagactgagctagcagataaaaaatcctagtcattgaccagcagcattgtatctaatattaatctctctgttattttgggtgccgacatggcggcagggcttgggtggctgggtggaaacattcatgttacattcccccaggttcccaattaactcaggagatcgtgtccctttccccttctgggggggtgggaagaaccaatgtatgtctcttttagggtcctccttgtttcctagcttctctggcagtgtggattgtaggttggtaatcctttgctctacgttatgacccagacccctgaatgtgggtgtcagatacgaggcctgggcaatctatggggcctctggtagtggatcagtatttatccctagtataccaatggactttgggagcccattccacatagagggatactctcaaaaccaaggccctgctccagatgatatgaaagactatgaagatcccccatgtagggcctcatcttccctggggagcagaaagaggatgggataggggatcagtgaggggtccggggagaagtgcagggaaagggaactaggattgacatgtaaaacaatcctgttggtaatttaaataaataaataaatgatcaggctgttgcctcagagctcagggaaccctgcggaagaggaggcagagtgtgagagccagagagaattggaggacaataaggaaacaaggccttctacaccaacatgagcaaagctcctatgaactcacagagactgagcagcatgaacagggccgtataggtctgcattagcacctctgcacttataccttctagattactgttttttatgggattcctgagggtgtgaatgggtgggcctctgattcttgtaatttttcttggcctcttttccttctactggtttgtcctgtccaacttcaaggtaatagttttattttatcttattatatttcattttttaatattttaaaaaaggaataacgaaatgaaagaatgacaatttagtcgctagagaaaaggttaacaactgaaatgtcattatccctgctaggagagtggatatcattggagttatactgtgcatctaaaaccactacacgacaggccacatgctcaggggtagttggccagcgcacaatagactaccagttttttccttgcttttatttggctattgtttgggggaggattttactgttttttgtttttgcttcttaggtggtgtttttgttttgttttgttttctttcatttgggggcttttgctgttgtattaggtttttgcttgtttttgagaaagaacttaaagttggcttgatgaggagagaggatctggtaggacttgggggggagaaagaacatttccaaatatatttgaatttaaaaattgtttaaaaactcaggcagtaggaaagccagtaattcatttaattagtaattaatatgaaggcccagcccattatgggtggagttacctgggctagtggtcctggattctatatgaaagcaagctgagcaagccatggggagtaagcagcaccactccatggcctttgcatcagctcctctaggtttctgccttgtcttcagtgataaacagtgatgttggactctaagcaaaacaaaccctttcctctccaaattccttttcatcaaggtatttcatcagagcaacagaaactctaagacagcactcaaggaagaaaaatgaatatcattttgcttttcctttgaaacaagttattttcaaatctattctgctacatgcattgtaggaaacttataaaatggaaaccaaaatatttactctcatctttctcatgaaacaaaatgattatatttccttagatgaatctgtccacattgaatgcatcacatagggtaaaataaataatgtccatgttaataatggaacagtactttcaatttagtaaaaagccacttactaatgtagagacagatagaattcactgttcctttcattgcatctagaaataatagtcatttattccatgttaattagctatatatttattatagagcacaaacaatggtaagtattaatgaattcacatataatgtgttgaaaatattttttaaaatataatgaaaagtcaactctgatttccaatgagagatattgtactgtggtgatattttgtttgtgctctaacaaataaaatttgcctgtacattagagtgcagagctagccactacttagccactgaggtcaagcagtggtggcccacacttttaatcccagtactcaggaggcagaggcaggcagatctctgtgagttcaaggtcaccctaggctacacaaaatttatccagtgtaagaaagaaacagacccaagtggtggtggctcacacctttaatcccaggacataggagtcacaagactttaattccagcactaggaagttatataggaatgatatggctgggtggagagaggaatataaagtaggagacaggagctcattgcattcagtctgcaaattcgtaggaacgcaatcacccctttggtctgaggattcagagggcaaggatcacagtctgacagctggggaagcagcataggactgaaccagggcccctgaatgtgggtgtcagttgggaggccagggcagtctatggggcttctggcagtggaaccagtatttatccctagtgaataaatgggctttgggagcccattccctatggatggatactctgtcatcctagatacactggggagggcgtaagtcttgccccaaatgatgtgacagactttgatgaccaccatgggaggcctcactatccctgggaagtggatggggggttggtgcagagcaagggtggataggagggagagggaactgagattgttatgtaaaataagattgcttgtaatttaaataaaataaaagaaaaagaaatagttgctggctgctctgcttctctgatcttttagcattaacccctgaatctgactctgggtttttattattaagacctattagaactcttgttacattgtacaacctgtttagatgggaaacctttattagatacaccttatacctttccaaatgtaaaatcaagtcagtaactcacctatataacacagtagggggaaagataggtaaacaatggtgtttaaaaaggtcaatgagcgctgggcggtggtggcacacgcctttaatcccagcactcgggaggcagaggcaggcagatctctgtgagttcgagaccagcctggtctacaagagctagttctaggatagcctctaaagccagagaaactctctctcggaaaaccaaaaaaaaaaggtcaatgagacaagtatcatatgaactaattttctgatcccagaataattgtataatattatctaacttacctgccatattttaaagctaaatcacataaattgaatatgttaacattattaagctctggatatagagcagaaaaagccacttcatcataacatcattacatgcattcagaaatgagtattttgctgcctctaatataaacaatacctgaccagggctatttgcaactgagtgacaacccattttaccagaaatagaagtaggtttcttaaagttacagttttgattttgatcaatactaaacaaatgtatacagccaaagccaccaggtttgtaataaactaagaaaaaaacccaaataattagaaacttgaaattctgaaactttacaacttttctatcaagtgcaaaaggaaatcttaacataatggtttgcatctgggaacaatttttgattccctatattcattggaaaaaaactaaagtcataaggggcagtgagtaccagtactttcatctagaagatagaatccccccaatccactgttcaaaatatcacagtccaaagtaagggatatgccttatgtgtgttcactatcaagaaacttttaatgcattaattttgttatggagatataaaaatttttatataaaaggagtcaatatgtaaaccacagttaactctcacttggatttttcttcttgactgctcgtctaatattttaaaaagttaacatacggttgtgttaactatatattatgctgagctaacatagtaaagcatgatgtactatgtttatactattttggaataaagtataatttaagaatcaaatgtatttaatggatgtgatggctaggtactttgcattgtactttgcattgaagatacagaattacagaaacttggaaaacgcctatgctatatgaagacagtcctgaggtatagaaaatttctgactgtcatccttagaacataacaaaaggtggttttagaaatgtgatcaattacaaagggttatgatttgtttaatgccatcatctttatatttcaactcattttacatactttaaaatgagttggaagctagtggtgaaaatgcaattgttttctgtaacttgatttttcagatcaagaacatttgtaactgctatctgctccactcatttcttaagttaaaggactattgttttttggctagaagtagtcccatagtctcaggttaatatagagctagtagaataattttgcttttcatttcttagtagtagagttctagaagtttatgtgtaaagaggcagatacttccaaagctataagtacaactgaaaggaaacttctggtctattctgatcatcccctctgtccaatagtatccaaagaccaacagtatgaaatgattgaaaagtctgtgaagttttactgtagctacaagtgtgcaagacaggaaaatcaatgatctatgaggcaatgtattgcacaactactaacaaaatcctgttttctaattgatataataaaacattcattacttagctaccttttctttccttgcaaataagaacacaatcagtgactgtaacaaatgaaacactggttattcttttaaaatatcaacattgtacaaaatggcaatgagcagatgcaatatttgtatggataagattcagcttcacaatagactgaaattagtgcacaatgatcaaaaacaaaactgctgtcaaaacagacatgagaatacacttttaaaatttcatctgataagaggttagaagcaaaagatgaaaaacaatagcagctcatggatgaaaatatttgtggactgtagtaacattgcaaaatacttctctaagatgagaaataagaaagaaatgtcaagattgttcttgtcattgttaatgtttcaatttccctgaaaaattatgaaaataaacttggagaatataagttgtttattaaggagaaaaaaatgttctaaaattctacaatgctaatgctttcatagccttagttgatatacctgtagccttctaaagccatcaagtcttgtaaagtgcacaaacatgcagactcacaagcttgcatacaatacagatggtcgatagccacataaatagatcaatgattacaaagatggattgaagagacaaaaacgagctcgactattacacatgcatgaacttcctgactataagaataattatacactagaactggttaattgagggaagttgaagaatcttttttcttgcagaatcaatagctacccatttatctttgatgacttaggtgtagcactgcctgaaatccagggtatggattgaaggacctttgcttctatctaatcattttgtcagtattcaagaatcagttatatagatcatgtaatctgttttgggttgtaaaaatcacatttgagaaaacataatcatgtgggaagctgtaggttttgtgccttgtgtgcactgcgctatgagatattcaactgtgtttctgaaccataaggcagtcagaaatacattgaagtagggggcaagtagaaacattcttgtgcatgaatttgcagttatgaaggagttgtgtagagctgcatttcatctaaggtattattggtatctacattagccttctaccacacacagcatgaacaaaggaaaagacagaaaaaggtacacgatgagacaactgcaaatgaaaccacaggaatttccctcctctgcaagaatgcacttgtttcataaacgatgggaagcagagggcagaacaccgtaaataaaacaaacatctgtttagaaagttcaggggtctggtttaaagtttagcacattttaagggagacctacaaaataaggactgccagatgtagctgcaagtggtaatacaaaaggaagctctatgcagtaggacgactacaggccacactaatgaactgttaaacgtgacaaggagaaattttgaaggttttaactataatcacatgaaaaacagttaaagagatacgtttagtcagacttaatatcatagatagatagatagatagatagatagatagatagatagatagattagatagatatagatacatggcaaaacttacactgtactgtattgatatgaactattttatgtttctatgcaccagttaaaaataaatgcaaaaggtatttctgtccctgatctgtcacttcatcactccttacagctctatggtacctacagtataatctatcctggtttgatgcgcatatctcttttattctgctttcactatccccacccattgattcaccatatgtggtctacagaaatgaattccttcatcttttgtcaccacctttctttcactagaaaactcaagaatttcaatagttctcatatttaaagaatcagtgctttccaaatggtccattgatcttgttttctatactgacgtcaattctatccctgagacttactttactgtaatactgcctgtagttcttttctactatgtactatgtcctggattgttcttctacctgggttatcatgtttttttttttttttatccccaagtagtacaaacatcttataaccaaaaattttcaatgaaaatatattttaaaagcatgttatatacacaactgatgcctgtatagttcagggctctattattttatacttttaaaaaagtactctgtatttgcctgtttagtctattgatagaaaaccacttgatatatgctacagctgcattaattttcctaaacataaaattaaatgttcaatagtttaacattcaacttgtttaccaggagtcaaaaagttgaatgtacacaggatctaggaataagtcaaaatgggtaactgagataaggaactctgaggcctgtagcatatacatgacattaaatttctagcacttgggcatctaaaatttgaaataaagcatatctcagaaatacatagatacagatagaaaaagaaggggtgagaggaaggacaccaaccaattcactaatcatctcccatatgcttgctcatgactatcttctgttaattcagaaaaacatctgagtaataaaacatactatctgttatattcctcaagtaaatgcccattattcagtctcagtagaccattattgaatgatattaatacatctgtaacaataagtctttacttcaagctgcttgagccctgctgccacatgggtgctttctgccaggctacctgagttctgccagccaccacattaaggtcccaaataacacacagagacttatattaggtacaaatgctgcttggccaatgactaggatttcacaccttctagctcagtcttaactatcaaccataatcataagacttatcttatggaggatgccagaggtaagcaccctctcttgcaggcagatcacatagtggctccagagagcagagagcagagagcaggaggaagagcaagagaaaagggacaacttcctatttgtcgctgcttatatgagtctgcccgctatgtcacttcctgcctatatcacaagaattccttttattacatttcccagaatcctccttgactcctattcctgcctaacctgcttcttcattggccaacagtactttattcaacaaccaataagataaacatatacacagaaggacctcccccatcatacttccaagtcaagttaaagatgaatttgttccaggaaactaccttaaccacagcacccacaggaacatagctatcaggttctagacttcttgcttgtctcgtggacttctttctttgggaccagttctcaaaataaaatcaaatatgtatctttataaataaaaccaagtgtattgaaatagttgtcaatatattcaccaaagcaagttgtgtgcaataatacatgtgcttcttgattaaagcattaaaaaggaagatctagtagcaggcctactgagtactttaattttgaaacagtaatgagtataaacaatggttcttgatatctgccacaactgtaatgtgaaacaaacattacttctattactgccagtttgtaagtactgttattactattttggtacattgtacatgcaaaatattaattagaacaatattaaaagatgaaccattttatacttccatgttgacaacctgctgaatcctttccaattgcaccgaactaatatctcttttaaaacttttcttcattatatacgacctccaatgtaaatcttatttatttcatatatgcctggcaatataagtataatttctctatcaatatattttctagcatttaaaaattattcacaagcattagtcatctcaaataaggcatactttaatttttctctaaaagtttaaaattttttaaactgccagtttcatttttggtcagttctatatctttgtttaacatatacacattatttatagcatattaaactctggtcttgtgagtatgtgcatgtatttttgttttctcttgtctaaaatgatcacgttaaattacgctaaattacatacagtaaatgttcctgagcaatctgaaaatatagtatatgctgaaatgtttctatatgttatagcattgcaaaacatttcagtttctactgcacagtgaattcaatgtctagctgaaattttgatatatggaaatatatgagacatatggacatagggggaattagtattttgttaataactaacatttgatctttatcatgttgactaaattaaagtagtttttttaatttttttttaaagtaggccttttattctgccaaataagtacagccttttagctatctagtgaggaagagtttatttacccattctaggagatgtaataccagtgttaattcaaattccttggaaatgatgtgtccttaattgtttctttttgttgttgttgttttgttcctatgagaagaaaaactgtgttcatgagcaacaaaccgtgattatgcatggatggagtttagcactgtaatcaaatagaacttacaacaaagttaatctgatgatatatatttaatgctgtatattatcgatggtgctacatggtaattagacataaatggtaaacacctcatatgaatggcaaattgatgctacttttgcatcattgaaacaaacatatataatttggagtgaaaaagaggtcttagtgatgctagtatttttcagcatgaggaaagcagtgtttgggggagcagcaagagtacaatcatttcaccagagtagcattcttccttaccagaatgtcttcagacataagatacatccatagtaaccttaaaatctcaggttgccttctattggtgtatcattcaatcatacatcttaaatacctggcttttcacagaggcttatcaaatagaagccatgaaaacccagaagactgagactggagagatgggtcaggggttgaatgaatgtgctgttctcagagaggatctgagatcagctcccaaagtaatttacaactgtttgcaactcatcctcctgggagaacctggtgcctctggcatctagagacacctacactgacctaatctgtgctgggattgtttgcatgacaactgaaaagaacaaggcacaaaattaaatgtgagttagttatccttcttttctttgattgggaacttctgttttaaaatatgataaggcaaggtaggtatatttgtgacaccccaagaatgaaagctttttaatcttgagcctatataatgaaattttaagaggatgggatcatagtttggagattcaatcaatgtagccatacttgtttattacgttatacattttcctctaaacaccttggcagatgaaaaactaattcaaatatgacatatcaagttgttgaatttccagcaagtttaatttttaataaatattattattttaaaaatcaagattttaagtactttagaaaataaaagaaagaaaaactctcatttatgcacatcccatatatgaaactagatttcaaagtatgtatataaaaatatggaatgcctttgcttcaatattttataatatgtaaaatgtacctttgattttctttaaattatttgaatctggtctaattgggaggaatgaactgtttacagttttgatacagtagaaacgtacatagatgtttaatgaattccctaatttgttctggtctacattgaatacagctctatttaaaattgttacattaaatcttactttgcattctggggatgtaagagaagtcaatcaaatttaaatcctgcttggcaacttggtgcttcagaagtttcctacctgctgtgtggaggctgactttgaccagtctcacctcttcttgtatttgagatctctatgcatcctgctaagcctttaactctttctttttcaaacatctatgtgactggtaatattttccttctgtgtttcatctacattgtaccttctttttttttacaacatatttgttaaattattattatattattattaattctctccctccttccctccctccctccctccctccctctctctctctctctctnnnnnnnnnnnnnnnnnnnnnnnnnnnnnnnnnnnnnnnnnnnnnnnnnnnnnnnnnnnnnnnnnnnnnnnnnnnnnnnnnnnnnnnnnnnnnnnnnnnnnnnnnnnnnnnnnnnnnnnnnnnnnnnnnnnnnnnnnnnnnnnnnnnnnnnnnnnnnnnnnnnnnnnnnnnnnnnnnnnnnnnnnnnnnnnnnnnnnnnnnnntctgtgtgtgtgtgtgtgtgtgtgtgtgtgtgtgtgtgtgtgtgtgtgtgtgtgtttgtgcgtgtgtgtgtctgaatgggaacagctccatgtttcaagtcaaggaacaatgaacacacttgttgcctgcaagagtttaaaaataataaagcaaacctagttaatgctgttttcctacaagaggatttttttcgaacatgtcacattgatgtgtattatgatagcaaaaagtcagtttaaacccattaagccttaatcttactgtaaacacgtccaaatttaaaacatgcatgaggtaaactgtgatgcagacataaaccatccacagaaatatgacttgcttgtgttgtttatacaggttctctaatatttacagagagtatgggggaaataaattgttaaagttacataaaatgaattacttggtatgtgtttcctatttcaaacagggcctcacacatgtatactatgctatcattgaactggctgtgtagtcaagggtggccttgaactcctaccctccctgtctccttctaagtgctgagattaccggagtgagtaaccatgtgttcttgcagtgctgggaatggaggtcagagcatgaagggaaagcaaacacactgccaactgagctacaattgcagcctctttagacatttttctgaaggttacatttgttacttcaaatgtctaatattgaataacgtacaattcagattctattttggtaaagggggtacactatcactgatatttatcacaggagatgttttaagcttcaatgagataataaataccaattgcctgacataatacccaacgaaagaatagtctgccacatttacctgtggatcctgagaaaaatccatataaatgaaaactttagaacattcagctttttcatccataatatggctataaaagaactatttaatgggcccattatgaggatcaaatacatgcaattttgtgatatgcaaagaaagtcatatctataaatgcacagttatacttaaaagcacagtagttcaggcatggcagaaagaaaactggaacctggatcttaaagactgactcatctcaggaataaacagatatagacactacagattctcttatccagagtaagaaactatttttttcaggagaccattaagagatgcatctacaacttctatgaaagttattttaaaaccaaaggcatgcaatatacctgaattagagcttcacttagcaactgttcattaacctccaaaataatgttctttatttcctcgtatggcatgcgataagatcccaggaagatagctaaaataaaattagatattattagagacagaatagtatcaaaaattaaaagtccaattatatatatatatatatatatatataattaccactgtatagataaaaatatgaaatatttgtcacttatatactaaaatttagaattataggttattagtatttgatgcactattctatccgtataggcaaaatatcctatagcatctgcagctcaagtatacatatgtacaaaataaaattactacttagatctctcatgatgctatactcagggattttatattaagctgatacaaaatgatcaaccaaaatttaaaattaaaaaaaagtattaggtgaaattggtcttttgagtcgatctagatattttctttctgttttatttaatttttttcattttacataccaaacgcagttacccctccctttccttctctcagccccaacctctccctattccaccccagccactcctcagaggggggtaaggcctccactggggagtcaacaaagtctggctagccaagctgaggcaggactaagacacttcccactgtatcgagactaagcaaggtattccaccaagatcattactgggaaaaccacagtgaaagctgatccaagttagtgggagctcaaggattctagactgacagctgggggacctgcatggcagcaagctagcccctctgaatgtgggtgacagctatgtagcttgatcttttggggagagggctggcagcaggaccaggatttaacccaggtgcacaaactgacttcttgcagtcaatctagatttcaatgtcaaaatttttggatacattcaacacagaatttctaaggaatgacaacaaggtaaacatcactccatctttctcaatcttagtctaaacttattccggaggaagttgaagaaagaattagtgagttttgcattgtgttatttttagtagcaccatgaaattgcatgccatctcaccttgtctcctatatctcatctaacagtacatctgagaaatgcatgccacttgttccttaatcatcttatagctcttatggctatgatacgatatgcttctccaaacaactataatgctaactgcttactctccagtggaattttcagacatggagctttcagaacagaatgggtccagaagagatttgactagtcaattgtggacttcaagttaatgtactattgatactttgaatacattgctgaatatactattagaagatgagttaggattcaaagaatttaattggtagggcatgatctgaatcacatatactggcccaaactttccctctcatgatctctgcatcttgaccactctaaggttagtagccttgatccaccatgatactttgttcctctgccttgaagccaacagcaataaaaatgaccagccatggactaaaacctgaaaaacaatgagctaaaatattttttcttttagctgaactattcttttattttttgacaatgactaaaagtttgttataaaacagtagcctttggacttatcagattggctgtgaaagtatggcattgcttactttaaagcaacctatacaactcttaacaacaacccaaaggtttatgagtacttaagaagcccacttgaatatacaaaggagaatatcgcaggagctgcttttgggagcatatcattttctatcatcctgtgaatagtgatacaagtacaatgaggtattcctagggaaaagtgactgtgccatattcatgtaacttttctttctggaatgttgttataatcaaatttttaatttattattgctaatatatgactctgactaatttataaaataaactttacccaaggcatatacatacatacacagagacagacagacacacagcattaggtacttcttgtggtttcagtcatcaacaagaagttttggaacagatcccacacaaatatggtaggatactactaaactttgcaagagaagagctgaagtgcatgactcgtcaatgtactctgaatttctgctgactctcaggtagtgaactattactctcttcgtatactgaatcatgatcctgtcaatatttacttcattggatatattttatgtcatgttgggagaattcaactcatttttacctagaatagctgacaattacaaagacagtccttttaaacaacacattcaattccattctccattaaattcacttaaaaatatgggtatgcttttagaagtagaacctgaaatcacatattaatgttttttttacgaaaagctctggatgactgcactgaaagcaaaatgattaccgtttaaatggttgcctcaacatgaggactgaatgagaactcaaaaccttaaataaatctcatggacatatattaaccagaaaacaagatcatactgtgtactgaaaaaaagttactgaaaaacaactttgtgaaaaaaaatactgtcattgcagcaatgcacaaattgttgatagctattagtagacaaattctggagttgtattttgactaatgccagaataataacctgtttgctttatctaattctcaaataattctcccattactcttgtacaattagaaatgtagcatgtgttaaaacttctcagagtgttttagtatcctccgtatctataaaccttctttagtgatcaaagaaaatattctaaatccaattcagaagagagagtatgtcaaagtaaaacttagatgctggcttaaatggacatgaatttaactgtccagctatgttaccaataccacatttaatggctcagtgcttagctaaaggcctcaaggatcagcaaccagtcataaagtgcagtggctaacaatttaacaatatcacattacaattatattaaacaaagaaatagcaataaaaggacatgttcacactgactagggaatatttctaaaaaatatgaatctcagtactagtcagaaaaataatcataaaaacttaatattttttcaataccaacttatattagatttcataatgttcagtatggaagttttattaacaatattttccaaaactctaaaaatcataggtttcactgggttaaacaatgttcaatttttattttcttcattttggttaagtggtaaaaagcaacctggattatatttatatagtatctctttctttttcattattctctcatatattacatcctgaccacagttttccctccctgatctcctgacagtcctgctctactcgctcccctctcctcaaaatccactctcctcagtttaaaaagggacaggcctcccagggatatcaatcaaacatgcaataccaatttgcagtaaaactaggcgctactcctagtgtgaaatctgaacaaactgacccagtaggaggtttatatagaatcttgtttctaacagtttatctggacaaagaggttgtaaggttgtttacactgaataagccatcactaccacatctatgcaaaacatattacatacacaggttctgtgctgttttgggatccaaaattctcagttccttcactttcttctttggaggtccactcctattttcttctgcagcatctatattcctttgacctgaaagaaaaatgttgattcataaacaataatggtcctaatccaagtacatgaaataacattagtaggcatgttaactacattaataaaggtgattctgaaatcaatacatgtgtttatttcattagctgagggaagaggataaacataaaaatacagacctgtttagagctttgcctacaaattaaatatcagcacttaagcagaaaagataagccaaatagaactaaaaatcaattgctgcttcttccctaatgtgtaacataaattactcctttacaggtaactgtagcagcactgggattaaatatgtagtaaaatctcactaatttggactaattgaggaaagaggaagacctgcctcctctcctaaaacatgttaatatttagatatgcatttaactcagtgaaactgctttaaagcacctaaggtaccttaagatgctaaacagattgcaacagaaacctcccgattgagactgatatgaagaataggtttgaagcatttgtgagttgtaccagagtaccagttatttgcatacacaaaactacatatcctcaaagatggatattttgagtctgtgagttttgtcttagttaccattttaaaaagtattcttggaacaatattattcactgtttcttcaaatgtttgaaagaaatgaaacaaggagtgtagcatcaaggagagtcattaggccctattcacccttcaaagacactagtgtcaaagcctgcggctgtctgctaagaaaatgaagcatgaagtgaagtccccaagtcccatctgcatagaaacacttcaccagttgcgcaagtacttttggtttacttcttccttgataaatacaaggctgaaggcattgggatcactaaatcatgttagacatgtaacaccaacctactttttcaaccaagggctttcttgtgctcaaatccatgctgctaaatttcattcatccctgacttttacaattatgatcattgatttttattattttaactcatttaagcttggtgaaagagttggcacagacattatttcctttaatagtaaaaaggtgacactcaataatatatctttttaagaaaagatatcagcctcagtgacacttgagcaatttcaaagaactcgtcaaaaattttaccaatccttagatttcctttgcattaatggtctaacataaacaaattctgttaccttagcagactagttacacatgaaataaattaactatagaacacaatattaaatgttctaaggtttaacagaatgatcaatacaagaatagacacagtatgatgagactagataataattcccttgaaaattatgatttttgtgacaggtatcaagttctttgaaatgttgccaaaacacaatcattgggattggtgaaagaaaaattacttctagtatatttatttaaaagccatcataaacgttcctaaaaggatctttctgaaagtacagtgactttcttatgcaacagtcaacatttcaatttattctaatttaagctgttctcagcttaagacaactgcataaagaacgaaatgacagttcaatagctatttctgatgtcaataaagaaaatttaaattatatcaaaattacctctggaagcacattcagaaaatttaacacaatcaaagaagtagtcaagaaaatgttcctaacttcaataggccttaaactctgctacagaaaactaattagacatgaacatacaggttgaaatactgtaagacaaaggatgtgggattattatttataaataaatggtgttctggctgagaggtgaacagaacgttcattaatgtccttttacatacattaggtcactggttctccacctgcatgggtcaccgccccattgggggacacatatcagacatcatgcatatcagatatttacactacaatttataacaatagccaaattaattacagttatgaagtatcagcaaaactaattttatagttgggggtcaccacagcatgaggaattgtattaaagggtcaaagagttaggaagattgagaaccactactttagctattatttttcattaaaatctagtctgagctctttgattttctaatgaacaaaattttcgacattacaattagatagcctacatatctgtagctcatagtttcctttggagttgtagtctattttacttgatgaatataacttgtctaaaaccctgagtctagaacgcactaagcattccatcagtgggaactacagttttgaaaatcaaagtagtgcagcaagtttaaaatagttcccaaactaggcacgttttccaaaacaatggctatttttgtttttatccctgtttatttatttattttggttttaatattccttacatatcaataccagaggctcagatagagaattcaaacaatagtgatgagacagcaaatgtccagaacagaatgtattaaagccattatttgttaaaaactctcttttctagtgatctcagaatgccacttttcataaaccaatttaagcccatatgattctaatgcacacaaacttttaagaattaattaaaccaaagctgtaatgactgaaagttatttggataacactgaagagttattttttgttttagggttagccaatgaatgttcttgtatttccttaaatatgtgggtatttacatgaaattgtattataaatttattcttttataaacaagggatgctcatcatcatacataaagaaaatatgtgtataagcgttctacaatctaatatgagcaatatttagaaataatctttaatttctggtacattagtgagtgcataaaacatttgacccagatatttataattatgccttaagctatcttaaatgggtaacatttgatgactcatttggtaatacataatcttaaaattattgttaatttttaacatatcaaaaatccccataagatagtttcctaaaggtagactcaatggtattcatttacaagttcaccaagcagtcctagtaaaggtcttaaggtatcatctggtccttctaggtggtacttctatggctttgctacattagtgttcgtaattttctactctttcaaaatagaaataaaactccagactaaagcatataaaagttccagtctctttctgcagtttataaactgctagccttggaaatcatgaggaacaaatggaggaatcacaatcaacataggaaagagggtaatcttttaaatgtaggtaaagtttactcagtttggcaagcaacaaactattcaagtgtgttcaattgcctttgtacagaatagcaaatttgtttacaaaatcttgaaagggaaagatgatgcaatgtgcagaaagagattgcacttctgtcttctcattcatgctacataggacagctgcaaagtttcccctttgccctgctgcctacagctgcaaagtaaagcatcctacagaaaagtagattttacctcgacacctgcatagtacctgaagcaataggaatggcattatcaagagtgttcctgaagttcagtgcacattaaacaagactaatggtcctaatggtaggaatcacacacacacacacacacacacacacactttgtagtgatttcctaattgaggaacaaatcttactagttgtagtttatacaagaaccccccctccaaaatcaggaagcacatgttactgcaaattaacatctgcataactaatatacttgtacacctgttcattaagccaattactgaacactgttaaatgtcactagaacagtatgtttaacaatgtgcatagctaatgttgtatattttcaaatcagcctgaatatcttggcagatattgtatattttagggagaacaaataaagatgtctttaggttttagggataaactttgtttcagctggtaatttcaaaatccaaatcaaatcacagttcttatttcaatgtagaatttgacaaatgaggccgaaatttttcccattaacttttaacctctgctaagtacataattcaagttggagtctgggacttttcccacatttcctatagttttctatgaaccaatggaaatctccctggctgttgtatctattaaaacttccatgttatgttaaaaaacataattcatgtgacaacttgatgattcaagtaataaaccacatgaacaacatgtatcaaatacagaagactatcaggaaaagtacaactgcaagaaaaaataatgctaagttctagtactggtaggctattagggcatttcttattgagaatatggtttggacaagcatcatacacaagctgctctgatttttgtggtcaattgtagattactgcaaatcctatagtcaatttggcttaatatggaagacagttaattttgttaagcaagatttaatagcacatatataactacaactaggcttgacactagatatatttcccccacaaatggataaaatacttacttttattagtcaaatacataaaccaggtagctttaaacaagaagcaataacttcttcatacttctgaaacaagttcaagatcaaggtgttaccaaaatggtcaccatttactgtgtgtttatatggcctttcctcagtgtgtgctagggccatagaatgagactttctggttatctccttataaacacatttttagagccgaattatgtcttatatcttaaagtttgattacttcctcagaggcttcataaccaaatagcatcatacttcatagtaatttcaaccagtgaattttgcaaggaaccaaatattcagcatataacaatactaattattttacattattgcaaagtgaactctacagggacaaacttgtgaaaggccacaaggaagagttaaatggctaaggtatctggtaccaaattctcttctctcagcactaagttccatcatttcccacaagatgaacagctgagtgtcacatgtttataagtaaataactgctgacaagagagttcactggagacactcaacatatgttataacttaattttcctaatagaattctttatgttgtccaaagtatgttgctgtgtatttttgagcactaaatcaaagctctttcttttttctttgcatggcatggtatcctcagtttcataaaatgtaattctgaattttgtggccagtgatcttagtaggaaacactctgtattctgttttgtttttgttttttcttttctttctttgtttaaaatttaagctactcgaaaaggaaggtaaagatttgacatagaataatgaggtcaggtatgttttcattcctgcctaatccagcctgacaaagtgatgtctctgtaatgtatgaataaagaattttaataagaagattggtgataatgtcagagatctaagggctcacagaaatctctagatgaaaaaaggggggggtaattgagggtgacacagcaatgctcataaaaggcacatgctggcaacccacattcagaggtcttggttcagtccaatgctgtttccccagctttatgactagggtctccatgttatcattaagtcaggtcaactgtttctgagggtttctgcagcaccgtcttggcttctttgctcattcctcctccctctccacaattggattccaggggtattcagtgcttagctgtgggtgcctgttactgcttcaaatatctactggatgaaggctctcacatgcatgagatatctcaagacaaagaatagcattgggctggctgaccacctctgccatccttttccaatctcagcatcaacagggagagcctttgaaaactctagggtaaacagatgtcactacagtgaaaacgtacatactaaggagaaagtattagtaactgtagaggtaaaagatgtttaatttgtcctggcaaggtgatgcacagctttaatcccaacacacaggagacagaggcaggcagaactctatgaattccaggtactcctggtctaagtgagttccagaacagccagagctgttacacagagaaactgtgtctcaaaaaaaaaaaaaaggtttaacttgttattatcatatggcacccatacctgtttcctaggtagcctacaagaagtaaatagaatacacatgcaaaagtttcacagtacataaaacacaacacatggttgtagcaagtgagaaaatatttttgggttggcagatcaaagtgtctttgttccaaatgctcaactcagcttcattactgtgaagcagccatataaaagaagaaaatgaatgagcaaggaaactaaaatatatatgtttgcaaaaccacatgtccagatagatttgtcatggattatgtaatttggttgtatctgatataagaagtacctaataaatcactaggtcctcatctctttcctttccaaagaggtcaatttattcttatttatacttttgaaaatgtgagtaaatgttaaacactttccttgcaaaacaatgtttagaagtgtcctaatatacctgttgattaataaatctggttttcaaaaagcattgatataatagatcacattttttccctcatcatttttaagtttgtctatcctacagggatcagtcatctgataccaaaatgccattttgtcttgctcctccaaaattatcatataattttactatatgtcttcatgtaaaataatcacaaaagctaatcaactttaatgaaattataaaatcaattttacttctccattattattaggattgaatatatttgataatgatttacttgtgagtcactggtttaaggcaaactaaaagtgaattctacacacaaaaaagcccacatagactttgagttttctgtaatatttttctcttgctttatgcacataaaagtattactgagtgtttcaatttggtttgttgctggctgagctcaatgggaaataagcagagctatattgtctctgtttttgccatttggattccaaccgctttcaattttatctttcagcagtaattttctttagttcggaagctacatcaatgtaatctgctgaaggtgatcgaagcattaggaaatctttttgcaagggtaaaatagagtacctgaactttctgcttctttctttgttcttaaagttaggtttagcttgctggcaacttttgatttgaaagcagaaaggtagtatttgagactcctttggaaatgtgcaaacatgagaagaaaaaaattcaaataagcataaaggttctattcttaggacagactcctgaccctcttccttctcagcctattatccttccctgttacatcatccactattttggaagaatacctgacacattgccttaattcttcccttctcctctattactttgttataaggtgaattctaattatacatttaccaactaagaatgtcagaatctccataggaaaggtcttgggatggatatatctttaaaattccacttattattagaaaagtttgaatcaactattctaaagcatatttaatacataaacctgtgagggctccaactccaaattgaacaatgtgaaaaactatcaatagcaatccccaaaagtcttctttgcatttactctaaatcacagatctaacactaaaggcagattcttggtcaatgcctgctgatctttaatgccaatgatttacatagttttaaatcatttaagaaaaagatgtatctctaaatcaagaacgatcgatcccatccaagtactaaccaggcccaaccctgcttagcttctaagatcagatgagattgggcgcaatgaagatggtatgtccataaaccaatccatatatttgtataccatagaactcatatatacagatttctataatgaataggaatgtattttacacattaattaaaactgcacatataaaattctaaagtggatattgcattaattgcctctttcctttgtatgtagatagttgtggccatcacaagagtagaagtttaaaaaagaaataaatcagccattggaaagtaaacagtggctaaaaaccaaacttcttacttttgtaaacatttctgtattatctagtaacaaaacagccagggtaggtaaggactctgagtatataaaataagaagaagcattttattgtataaaaactggattcttcaaaatgaataaaagactatttactctttctcccgaggtgaaaagctaaaatgctaagaaaacacaccatggcaactgcacactatatagccacgttcaagtctatatgttttagaccaaaagatttgaacactaatataaaaaaaatcttatacaagacataagcctaataatttattgagaacaattaggtgttgcttactgtgcagctctcattaacttacgaggtgacaagttaaataacagaaggccctttgctatttataagagcatgtataagataaaggtaatgattaagaaaaacattgcttgactgtacaccataatctcatgtgtgactaccaaaattcttactaggttttagaaatgtatataatgcaggtagcactattacaatgtaaagttaaaacacatttcaaaagattgaagtgaaatcttcattgtgctaggataaagaagaaatacctgtaatttaaggttttaccacaaacttattaaagataaaaagagaaagtaacagcccagataagaagcagctgctaatagtcacagatagcaaatgaatttgacaggatcaggacaacatcctgctggttctttttcctcctaaaccatttcaaacctgctgtgtttgccattaggctggcctttacttcaccctagccacttcagtcctaacactgtgggggatcattgttgcttccctatggctactgccaaagtgtacctctctgcttttagcctggaatgctttgaatctaaacgtaagcactggttataactacagagaaggggcaagaagtcaatatgtaaaatctgaaagagaggtgtcataaacacacacacacacacacacacacacacagctttaaattggtaaatggggcataatacatttctaaaatattacttaaaagcatgctgaaaatgtgcttcctttattgacgttttcacatatacaaatgttaaagtgtaacccattcatctatataattaatatgctttaattgttaggacaattcatggaaaagaataaaacacaaaaatgttcctagctttgcatctagatcttatgaaaacaagcctggtgagtcattaaggacaaatttgtgaaacactgcttagtaaaaccctcacatattagatacaataagtgagaggcaacacaggacagaaacaattatgcttacttcgaagtccttcaagtcttagtctcagaatagttacattttaaataaatcatttctctggagtgagttaatgctgtgtgcctaatacaggtgtaagaaattgaagctttctaactgtgagttctaccactgtatagcaaagataaatataattaaaatagagggttgcaataggacactccagtagccgcaaaataatttgagcttacctccctnnnnnnnnnnnnnnnnnnnnnnnnnnnnnnnnnnngtatggtagtctctattaaacactctctacttactttatcttcaactaaggcactaataatgcccttctattatcgatcaactccattaatacaaaggcatgtaccctattgtcttgcctgtatcccaaattgataacaaagggagtatgcttcaattccccatcaatgtctcctccagaggaataacaagtttgagagatcacagtgaaaagaagatgaagttgcagcagaatgagtgtgaatctgatgacaatctgacttcagaatgttggcaggaaagacacttaaggataagctcagagcagaaataacagtccagacagaaagcgtaatcaaaaaggtgtgatgaagccagacagcggtggtgcacacctttagtaacagcactcaggagacagaggcaggtggatctctgtgagtaggaggccagcctggtctacaaagctatacagagaaacactgtctcaaaaaagtgtgatgaaataatgtgtgtgaggtccccaaagaaaaacagaacatagttcaataggagaaaatgacaatatcacaccacaggaacgtcaagcatattgtaagtcttacaaaaccaaacattccagaagaaaacaggtgattacagatgctaagcaatgatttcaaagaaactattgtgatgcactacaagaaacaagaaagaaataaatggaaacagtgaggagatggcactcacttaagatacttagtgggaaaattatttctatctatggtgtgaagaagacaaaatgaatattacaagaaggtacctgattttcaaattcaagaagcatttctatgatacaaatgatttcagaacaaattcagcatacactaatttactggacaagatcaatagaaactgtgcaaaagagattatactgttcagtgatccatgttgcgtcaatatctgtaatggaatgagacaaggtgatacaatggcccaaagcatcctaaaattgctcttcaacaaaattaaataggaaaataaagtttctcacagacactaagtgagtaccacaccttctttttgcctagcagaaaaaagtaaaacacttcccatgccatatgaaaagtagaatatagcactacactagttagcatcagaacaaaatttgatccctagataataaaggatttatgccacgaacaaggctctgtgaacattactgccaaagacaaatgacaacactatctatctatgtgactcaagaaatgaaaaaaagtggtttgttcaatcgacaatggtacagaaacaagagctcatgccactttattggcacagaaagagttactagatagcatactgctaataaaggttagaacaccactacttaactttgtcatattgaggttaaagtgaaatatgagtattaatctacatcattagctgaaggacagacataaagtggctgtcatctcattgcccatggtgtcctgaatgtatgaaatctgacaatatataaacctaatattagttattaaggcttctccccaatccaaatacagatggatcagtgaggtggcctgccaataagacaacaggtggctctctcaacttactgattgcatttgtggctttattaaaaaagatattccaaacaaattctgtgttgatttagtgaaaagacatgctgtctcaaacaacctcaatgcaatacaattaaagacagagtaaatttcctggtgttggtggtgcagagatcttacaccaggagttagaaaggagttccaagaaacagtcactgtcattaagtaccctgggacatccaacatgatgccaaattatcacttcaattaagtctttaaattgtgtttgaaaggtggttgtctgtatcatcctatgcctccttaagcagagcatgactatcattcagtaacagcacacagatcaaagtaatacttctttccctttctaacagtatctattaatgacattatgatcatatattttatttaatgagtgtcttactcagtatatttccactctgtgatgaccatgttacttcttcaaggtaaggatctcaattgacaaactgcttcctctagcacatttacctactgttgtgtatatgtgaatgggcatgcaaatacaaaaggagtaaacagcgattatttgaaacatctgtatatgtcagttcatattccacaccccccactatgcaatctaaaagagtagggagtaaaataaaagggattctttaactactggtaagcataccataaatagcaaaatcgactactacagatgataaaggagcagcctggctttaaaaaaaaagtgtgaatcaatcaccatatccactaatgtatattagatagtaatacaaccatgaggcaatgactcaactcttccaaaagatgcctaataagtaggggattctgtagcattctttaaaagtgtgtggtcattattagcattaaaataaaggaccttggtatagactttgcttaagcaattctagtaattaataatccacatggaaaaattgcacacagcttacatttccatatgaagtagaatttcctaatatacaatatctttggaaatgacttaccttatgacaaaatgaagtgtcaaaaataacaaaataaacctagcagatttaataagagagaagataccatagtttggtcagttattaaatgctgcagtttatcactgctaaaggccattgcagctgaatctgcagtactcagcctcattaaaacttagccttttaaaacaagtaatcaatgaagctgaaacacataaacatacatattacaaaaaaatctacacgaagctagaaaaaatgcatgtattgtttctttgaagctaagttaatcaaatttctattcctcaatcttttctacaatttatctcactgactcaaaatttgatgttttaggattcaagacaggagcaacattgttatctttcaactctattaatatacactatataaatatatatccatttatactatattaaattatttatagtatttgttcttgaaatttcttctcaatgactttaaagccaagacttctttgatctattgtaactttcatgctacacagctaaaactaggtattaacatgtatagctacaaaaaagaaaaaactgtgtagctactatacttaataatctacaaatatgacatatacttaaattacttaatacttcaatgctgtgatttgtaatgttttgctcaatttttgttttgttttttttctactttactaaaaatgatttaagtgttgcctactggtttaccttatagaaatattaagatgttgttgcttatctttatttgcttctttttacctgtagcataacacttttgactttctaaacttgtgtgcaaataaactcagaacccctagtttcccagtgttcaaaacacaaaagaatattcaacaatcctggatgtggtttttaatttaaacagaaactttctcctaatcactaagatgtttctctcgtactcaagatttcttaaatataaattaaaatcaatcatcgtttaacaagtcttttacaacaactgtattacaacttgtaattacttgtattttgattatgatgcatctaagaagcagccattattaattgatgtgtattatatttcataataatgaatctgggtttctttttaaatttcaatctttagtagaaaacctaccatctagcatttgcatttcccttgtaaaacacattattggtggcaaattttcctgtggcagaattttctagtgtcaagtcacactgcatgacaagcagagcttctgtgaaggctcctagagcctaaagtgactgcaggtaggcagatttcagccaaagctccccagtcataatctgacaaatcataagccaaacacacaaaagtacacatgcattcataattagtggttcattcataatacaaagaactgtgtagactgcatttatgttcttttaaatttctccaatttaatgcattattactttacataagaatatgaacttagtatgatgcattggaaaataaaactaataaaatgtgttttctacaaaatgtcacaagaattattctgattaatcaatagagggctatagtaatatcttttaaaatgggcattaatatccagttaaatttaacaagaagatacaaggtatagtattttctctattcaaatatgaattctttcgtatccagaaaactgcaaaataagaatataagaatttggaatcaaacttgaatataaaaattcttccctgaatttttgtttctgaaagtatggtaaaataaacaactcgaaataatattctagtgaagagattccatttctctgaatatattaaaaataatgttaaatatacagactatcaaataaaggaagcaatacccagatgccaaagagaataaacattagaaacagcagctttaaccttgaatgaagattaacttaagcttcaatttacaaagcctaaaagtagaggaatgaaaaccaagccatgggcctgaatgaagtggaaatataagagaaaattattctggaaagtactgtggactatacctcagtttaacatcaaattagacatcgacatagtcatctctctggggggttgaaaagaaaatccatgtcaatccttgccgtggagtgaaaattgtaaaaattttctttcagaatccacaagtaaaaaaaaaaaaagacaacctggatacagactaaactcacagatgtatatcagtataaaagaaaagcaaaaggaaaaagtatagcctgatcctaggttgttagaatcatagtaaaagaaagttaatctttgatgaagatcagtagcccttattaaggatttaaaacatctacagaaaatgtagaaaaaacacaaatgttaagaaatataacaaagtgtaattacagaacatattaataaataataaaattagtagatctgtagatatgtaacagaacgtaatgaaattacctaaagggcttaagaaaaaacgagacaaagtctaagatatgataattactatacttcttatatttgaaaacagcttctgttgtgttcccaagaggtaggtaggtaggtaggtaggtaggtagctagctagctagctagctaggtgtgtgtgtgtgtgtgtgtgtgtgtgtgtgtgtgtgtgtgggttaaaaaatgatacacaccagacaaaacaaggtatgctcatcaagtgaaatatagagacaaaggaattatccagagtatatcaatgatggaatatgagaaaatttaggagaaatggagcatagaatgagaaggtataattcaaaattataatttctaccttctagaatgtgagaaaacaataatgagtgagatgcatagaaagagtccacatgtaacttacatatctttacagacctttttgtactcataaaagtaaatttttatggactgtgaattataggagaagggaaaggtgtatataggtggttttggagggagaaaaaaaaggaatgttgcaagtaaactataatctcaaaagttttgtaaaggtctactaaaacatttttatgatgggttatattactttggttctataccaattatatttataatcattatataaaacttataattgaataaacatttgagttcccagtttgtcaagttttatttatttgaagaacaactaattggagaggtgattttataaaattcagattggtccaagcatcttgcagaggctgtcttatcaattatatagaaagtcagcatctcattccacatgtatgattctaacacaagcacaagtcacacggctgcaattttcctttaccttgttgagataataatacaaatatcacattagccatagaaatctatttatccaagttcatggaatggagatataatttaaaagttaaagtagttaagccattaaatgacttgaggaggaaaggaaataaaagggagtaagtgaggagggaaatgggaaagaaaggaaggagaaaaaaaaggcaatacaatagcaacaagatacctagaactagatattgcctaaaatatcaaactagaggataggtatctttgagtccatctatgcttctgcatattatataatccacattctggaagcatctgttataaacagaacccttaaactcatcaagccatcagctgtgtgatctattcacttattccaagcaccacctgcaaaaaattgcaaattgtatagctttgttcattaaaaaactgcctatgttgaatttctaccttccctgcaccataagattaaacagccctgacaaaggagattacacaattaagaattaaaatcttaataatttaatcagtgtttaatatcaccttacttatatggtagctaacaagaaagggaaatagttattttctatagaaattcaagactccttagacttaaaaaatggacataagactagttactttcacattttatatatgtgacttaagactaggttaaaaaaagagcatcttatgaatttataactcctgatgctattccacaggggcagctgctgagttttgaacacaggacctggttcaggttatacaattgctctaccatggtgctattatcatggtctaaaactggtgctcacaacaaaataattttggaaacttaagaatcatatcatctacttaattccacaggactgtcaatttacatcactctaccctagattcattacttaaaattcaacaaggaatttagctaagcatatttgatgtacaggtattcaatggaaccataaaaaataaaatagaaagaaatgacatgctttacaaagatgagacaaatcaaaggcgaaagaagtacccaaagtcctaaatcagatggacataataaataggatcctcaggcaatgatctggtttaatgtaacactcaaagagcataacaaagttcttttgttcccttaagctaagtgaatgtctttgtatagtttcacagacctgacacattttaataaactccaatgctaactccaatttcattgttagtggtaagattatttcctcttcagaggatgtaaaaaaaaaacataaaaacaaccaaatatccaaacaaaaatctacatgtttaattattgtgagtaattcatgcagattgtttgattccaaatgaaattcttttaatatactttcctaattatgctactgttgtttaacgaactatgcaagaatacatgattattcataaagcaatggaaaataaaaggaaacaaagactcaaaatgtgacaacgaagagaaaagacaaattgaaaagaaacggtggcctcagacacacacagtttgtacatgccagaaaaatgtttaaaacagcaacatttaaccatcactattataatagaggaaaaaacatatcattaatttcaacatacacttcagaaaaaaactgaatggttattacatgggatttgaaaaaaagtgcatctacagacaaaaccaattgaaagtatacttgtttttgttaacagttaaggcgatgataccagaagaaaaacatcaaatgacatcatgttatcaaccttcagcccaggcctggttttagcaacctaatgaataatgtaatgtggaacactaatctaatgcagtttgtaaagaaagggcatggactctaccatgaacttcagtggaaagagcagtaattctaatgaacataaaagccagagagcctcttgtacagtgctttgcatatggtaagtgctcaattactagctcttgtcaaatagaaagtacgtgcagttcatgattgtagctgtggatcactgtgtgcctatttgcattaatatcagttagcatgcctgggagaggatcgggaactaaaacaaacaagcaatttcagaaaatagagcagaatattgaattcactgaacatgtaaaaatttattggagcaaatagcatttcccaattacaaagtgtttacaaaaacaaagaatcaacatttagagaaaacgttacaaaattctgaaggtgttaatgttggaagtatacaattaaacataaagtaatttaagatgtttaatcacttattatactttatggtgaattataaaagatttgtatggtggtaatgttttggagtagaaaaataccctgcttgcttaataaaacttaatcttattctgtttgatattttcatttctcatttaattgagttaatggagcaacacaattacagtattaatgcatggctaataggcaaatcaacatttttccatgtttgtacaggtaagtattttatatttccatagctttgatatacctcataattaaaaacattgattggttagaattaagctacaattaacacacacaaacatatatatacatatatacatatatacatatatacatatatacatatatacatatggaacagagaaatgggtcacaattaaaaataaaagttccaaatttaccctaaacaagaaacattttcatgggctatgattttgtattttgtactgtgctaacttaaaagtaaatgttcaattcttgcattccagaagtgagaaatacatatacagagcagactttcatacactgccccaagaataggagatcagttttccacagaaaatgctggttttgatagtgcagaagattgactatgagataaaattaaaatgtctttttcttgatataatgtaatagttttaaaattagtggaatgttacaacgacagtataaggtaattgtcaatgaaaaatatggtagaaaaccaaacaccaagatgatttattatgtgctggaaagttggctcagtgactatgaggggaaactacacctgtacatgatcagagttctgttcctagaaaacatgttcggtggttcacaaccgtgtataaacccaggtgcaagttacccatacacctctaacctctgtagacactgaaaatttgtgtgcatataccccagcatgcacacataattaaaactaacgtcttttaaaaagcttattggactaataaaatatgacccaatgaaaaattaatcccagcactctggaggctgaggcaggtggatctctgtgagatcaagaccagtccggtctaaaacagctagttccaggacagcctccaaagccacagagaaaccctgtctcgaaaaaataaaacaaaaaaaaagacaaaagaaaattttgccacaaacatactggtgacagatagaagacagatagaagacagacagacagacctactgacctatcagccaagccagagatcttggtttggtgctgccgtggcatgcatggtgccaactcttatgtgtgaagacagtactgtcaggtaattcaaagctctttataatcactatggaaaatcgatagaacataggtgaaggttttggtaaagatgtgaaacttgcgggcatggtcagggtgctgcagagtgagagtttcaggtggctgcgtttcgctttcactttcacctttcggcttgcttctccacaagacacttagaaatttcactggaaaaagaattaattatagactcaagaaatcatataataccatggatggcaacggaggcaggcagatattgtatacctccaagttcaatagcaagaagattaccttctgtctgatcagaatgaatttagaaggaaaaactggacatttgtaaagttaatgctctcttcaagaagagaaggcatatatccttctgttgtgtgtgtgcacatgattttgtggagaggggcacaggaacatgtgtgtgagggggagggggtgtacatgagcatgtgaatgtggatgctacacaacagcattaagtatcttattatttatttactattttcgtggttttttttgagacagggtttctctgtagcttttgagcccttccaggaactagctctgtagaaccggctggcctcgaactcacagagattagcccgcctctgcctcttgagtgctgggataaaaggtgtgtggcaccactgccaggataagtatcttacttatagctttccaccatgatttttggcttaccaacatgaattttctgagtcaagcaatgtcactcaacttgaggcccacagacttggataaactggtcaataataaaagccccaatgttcttcctatctctaccttcccccaggaacaggaatataggagcatactgccatgctcggcttttatgtgggtgttgatcatcaagtttgggtcctctttacttgtgctgcaagtattttaccaatatagttttatattctatgttttattttgtatttgtcataactttttgagtctcctatatgactaccaagtttacatcacttccagcactccatcttttgcttcaaacactcctaatttcctctgtgattactgagctcttaattatcattgttacacacacacacacacacacacacctacataaaaatacagtctgctgagttcatttaatcttggtcatatgtatatgtgtttagacatggtcagtgtggaattatatattgtatatgtttattatatgagggatactgtgtgaatccaatgtattaaactagagaattcattatatttgtagttaaccattactttcattccacttaacataccctcacttaatgtactagctgaattacataaacacaatggaaatcttcattgtcttacttctaaaagtacatgaagtaatgtttaatcacttatttgtttgtatggtaattgggttccagttatttacttttcatactttccttgtgaaaaaaagggaatggagttgcaaaattcacacataccaacttatccatttttaccacaaacgtcttaatttacaaagcaacttagcaactcattcattctgcctcacattcaaaacttcatgatacatacacaaaatctatccaacaattcttgactttgtctttttcttaaattatccccaggacactagataccattgttacaccttgctcatcaataaatcatcaatcaaaaccaaaaaaaaaatcatacatacagacacacagaggcacaaaacccagaaactccaatgaagccctggctttcctggaactcactctgtagaccaggctggccttgaactcatagagttctgtttacatcttcgtctcaagtgctggggttaaaggtgtgctctatcacatgtcaccaacaccaacaatttaaaagtatacatcaacccaacaaatcccaattcatttagaatacctgaaatatttcccctatagttccactttatttggtcaagaaccccaactgagtatatcatttggtcatttgttgtatttatgttttttaccactgttttatataaccctgccccctgcatcaattattaactatcaatgagaccatcatgttctcatcccgatcctcccttacatacatgactaatgcatttacatcactccccttaaactcaccaatgtcccctttccctttcagacttatgatttcttctatgttatttttgctacacatgtacacataaatatgtgtgtgatatacatgcatgtataaacaacctactactgaacattgcttatatggacatatgtccagggatgatcacttgggattggatgacctatgtgggtactcatcttgagaggaaactgattcttcctctctcagcagccactgaccatctctcatatttcatctaggggtaggaccttgtggaatctttccatccatattggcatgtcaagtgatgttatcattatactaatcttgttgaagcaaacacactgttgagagttcactggcaaattttccctatgtagcaggtggcattctggtcctctggctcttaccatgttttccaccacctcttctgtgatgttccctgagatttacatgtaaaaggttaattggatgtaattctcttggcgttaggcaatccacagatattctctgcaattttttgcagcctctaattggcagaaggcctccagatatttattcaacaattccatctcctttccattcacaatattgtagacagtgaattcatatagacacattttatgtggcatcattatgccaatggtctgtaactaaacttcattaattgttagaattgaagattcaagatataactacttaactaatagctccactgtgatgtctaacacataacaccaattaataaaagacaaggaatatttgtttattctcgaaatttcacccacctccccatttcaaaaacatgtgcagtcacattgaacatggtaaaagaaacagaattactttgtgtttattttttatcacttatcctacatagtcaatttattatcaaaactcactgaactaaacaccaaaataactgtcaaagcagccaccacttttggtgaaactaaggggatttaagaaccatagaagccagcattataacttcagttgaaaacatggcgtagtcaagtaagtcagatgctgctgagaagctaaaataaaaattttgaagctgaagctgatattgaagggcatagactgttgttgttgttgtcgttgacaaaagaggaaagtagaataatagggttcaaagcttcactgcaatgacctgaatagagaagacatcaatggaagagaaactaatagcgttacaggtgtttgtccaagagtatacatttaaaaaaaaaaagaagaagtggtaaataattaaacaaattttaggtcaagagtgtttttttttttaagaaaagataaaacagacatagactgtgctgcttaaaatgatctggtgatgatggaaaaaataaatcatcatgtaatgggggaaagatgtaatgccatggtaggtaggggcaggtgaaacaaatgaataggatcctacagattaaaagactttcatttatactaagaagaaataatatggagacagatgcaagacaacttgttgatgatgggggtcttggactatggcttctagatttgacaatgaattatgaggaaggctattgttttccagtacatgctttagagaatgaggcctgagcagataaagaagttgaaaagaaatatggtaaatattgctgtatgaacaaaacacagtcactaaaaggaaatttaaagtaaatcgagaaccagaacctttttgctcatatgcagaatttgagtgtgaattctttaggcatattccatattttcagccaaaacatcacagtttcatgccacataacaaatattttaaaagacaaagcattattacatattttctttgttgtatgctcaaactcaattacaacagttcacaaatgaagtaacaccaatgcagccaaaccattcggtctttttgctttctatctatttctgtatagagatgtcaaattttaatttgatgacatagaagaaagcaattaatatttaactggggtagaaactatgtccaaagcagaaatgtttctattattctgtggattaccactgcatgatgattgagaatgatgtcttaatatgaggaatattcatttaaaattgtatcaagtaaaccagttttatttacagtaccagcagccgtggctgaaatactttgccttccctttagcattttaatttagatctctctaaatgcaaattaggggaagtctctgctcagaagatagggaaatgatcttccatttttaaatatcactattgtattagtggtgttgtttcattggtactctatttacacagagccttcatgcatagccctcaaaatactttgtaaatattaaaaagcatggatgcaatattggctactaaatttcagaaatgtactactaaaactatcccccaggaaagatcaaatattgctattttaaattatatataaaaaagaaagaagatgtacttattggagtcccagaaatagaaatagattaaaacagagcaggacataagaaaaaatggaaaattagtctattttatataaacttggttatgatattaatgttctgctatgtgataaaattattgtctcatgtaccagaataaataatttgtattaaaaaagaattgttttgtgatttgacttgtgtgtgcatgcgtgcatgtgtgcatgcatgggtgagtgcatcagaatgttaacctcacagtctaggatacaaacataaaatatatccataaaccttaaaatatcccaagatatacaagttgctgtgctttgctctctcaattctaagctccattttaacctaaggtatctaaggcactccatgagaaaagcaacaaaagcatcagctcttctttgtaaaaattaaagccttttggggaaaataactcatcataagtcatcttaatttgaaaatctaagccgggcgttggtggcccacgcctttaatcccagcactcgggaggtagaggcaggcagatctctgtgagtttgagaccagcagtctccagagcaagtgccaggataggctccaaagctacacagagaacccctgtctcaaaaaacaaaaaaaaaaatgaaaatctaaaactgacgaagcttgcacacattcacaaaatggcattcattcaatagagaagacaactgtaaagctcactaacacggttagaacattgtcaactcttctgtgatgcagggccttgaggatgcccaaaagtttgattttgtttgtttgttttttattgttaatgttcacttgattttgcatgaaaataaatggttttgtggccttttttttttttttaaccagggccacctacatgaatcctagaaaagaactggcggacgtgtggtcaatagagatgagattaaagtaaaagacagtgaggagacagtaatcagaatgcatcataaagatgtgcagaattgacaaacaaaactgataaaacacatcttcaaatgcttaaataactaactcggaattgtcatatattctatactgtagatattgtcagataaatatgattttaaattataagattaaaacagtgtgactgtttaaaactgaaagcattttcaataaagttttatttacctaaaagatgcagttaaaaacaggcagatgatagataaatagacagacagacagacaaatagatattagttggctcataaaaatctacatatgcatggattacactgtggtatttcaatgtaggcatatgataagaaatgagcatgctaggttagtccaacatagtaacacttcagacatctatcatttcttcacatttcagtaaattagtcttgctatatgtgtaatctggaatatcctcacatagtaccaagggataatcaatcacttggtccacaacttggagctactcagagctaggccaacatatcaataacaaagcttctaaatcaagctttagaaaaatagacattttctttataaatttattatcttgatgtctgttttaggatgaaaactgattaacatgcatctctgtgagttattttgatatattcaagtgattgctgtgaagcatacttttcttactgtgataatgaatgctggaaattatttattcaacaaatgtagagattgatgacatcttctcagaaagccctttgaggatctcacaatcaatattacattccctatttaggattagcattgtaggttatacacataagtgaaaacatgaggtatctctagttctaagtctgacatgcattatttagcattatggtctccagttccttcaacattgactaaacaatagacactccttctctttgatagctgaacatgcaagtcaaagtacatcacattttgtttattcaattaattttctgttaacagattgattccatatttttgatatttgtaaggttgtgataaacatgtaaatacatattctattcctgtataaaatttcatgaaaatggaatcatttttattttagtcaacttctgtgagttccaactttagcaagatatttattaaattcaaactcatttatgtaggtatttattatatttttcaatacataaacaatatgtttgatttaggtaaggaaacaacagcactgcaatagtttctcactaatcaatacatatataagagaaattctatgaaaaaatttattaagtaaacttaagtttcctactaacttacatttcacctggaccaacaaaaattaattttgagaaaaacatcaatgttcagaatataattgcaaatttataactgggattataaaaagaaatcccatcacagaagggaaaatggcaacccagttctccacaaatgattatctgaaacataattaggtcataacattcccatttaatctgagtaaacactttacagaaaacaccctgccaggaaaccattctcccttataaaggcttttctcattcattacctcatttcagcactggatatgcatatattgtcaacttcctttatcatctgtcctctgaaaattttaaaatggtaagttctcaatgaatggtaccaggaggaagtgtaagaatgaatgagccgaagaagggctaaatgccatcaatacatagtcatcatcagtgtcaaacagagaagacaatattaatctcttaaaatccatttagatatagaataaacttatggattttcaaggctagtgatttatccctattgtccactgactatcccagatggaccacattaatgcacatgtgggagcccacaagtgactcaggttccatctggagtctattctgacttacaagacactagagttcaaacttgcttgctccagtctccatgagcaagtaatgattatgcatatggaaaagagcatgttatctaacaagcttttgatgccagctgtaggcacacagatagagaatgcagctgcttgctaggacccgcatgatagatagtgagcctggctgctcctccattcaaggacagtgcggggcactggttaactgattatgctgctcttctgcttcgcctccagtctgtatataagcaggttcgaaattaaacttcgggctgtctgctgtgctaaaaggcacggaacgggcagtcctcatgaatctatcttgtgtttatgtctctttatctaccatttctcaatcctcatgcccctacacaggtaacccagctgactccttggagctggccccggacatgataaacaataggaataaagtaagaaaagtctgttgaggcaaagtacatctcagtagtacaacatttctatagcattctcaagaccatgaactcaatacctagcaacagaaacaaaaatcagtttggaaaagaaagaggaggagagaattctgagattgttctagcattaacctttgttttatcctgttttaagtatgtgggtgtgggtgggtgtggatgtcttcggaggccacagattgtgtcacagccctggagccggagatacaggtgatttttgtaacaaacctcaggttttctggagtgagcaggaaagttcagatgcatggattcctttctgtaatgctatgattgtctttagcaatgaaactatttaaaatctgaagaatagatttttgtcattaggaattaaaaaaaaaaacaactctcaaaattactattgcttgcattggtggtgcacgcctttaatcccagcactagggaggcagaggcaggcagatctctatgagttcaaggccagcctggtctccagagcaagtgataggataggttctaaagctacacagagaaaccctgtctcagaaaaccaaaaaaaaaatatttatcaaacaatgaacatgtaatgataaaatattaacatttgaattgctaggttacaatgaaggcatgaggaatcaaaaaaaaaaaaaaaaaagagaagaaacgcaccacatacattattgttttgatttctaaaatgcagtatgtatgttcctacaacaacatgtataaaatgatcagtcgacatgttaaaatgtaataataaacttgagatgtacatgaaatttaaaatatatttgatgcaagcataggcctcacatcagcagacaagataaacggctttgaggcattcttgctcagagctctgacatctgatgatgtgaactacagtcctgtctggtcagaagagaattatatatttcatcggaacgttccaattatttctagacgtcaacttaccaagctcagaaatgacggcccccaaaaaactattgcagggtttataagtgatacaatactgaaattaactgaaatatgctttttaaaattatataaatggtgaaagcattttcttttttctgactatgttaacaaacatgcaaatgcaaatgtgttttataaatgttttccataataatgcctcagacttaatatgactataaaaattaaaaaatgttcgtgtatacacacacacacacacacacacacacacacacacacacacacacacacacacaaatgcatgcatgcacacacacactcacaagttgagtattttcaagtcttatccttaaaattttgtaatggtaaaaaaaatgcaactaaagcattgaatgaaatgttacatgtttagtctctatttttacatcttcccagcataatatgtctatcaacggatcaccaagttctccattcttcaggaaaggatgtgtgcatgagaaaccaagtgaaaacagtttttttctagatctctctctcatgtaagcaatgagaattttacagcatgaactataaggtccattaacaatttgatacacttcagtttcataacatagctctgacccccttaatttcaatatatttgcctgtcgtccatgcttactagcaactccacaaccatgagctccaaggaactaaatgtgcattaataggggcctccttcccaaagcaggaaaaactggctcagtaccaaccacaaagataaaagttaggaggggattgaaatcctgccaagagactgtcacagatggagactcaagaaggagagtatgaaaataacacatccaactcagtttgaatggaagccagggataatgaatagcacaacttggataatttctcttgagcctgtctatattagagttattatatgccactcagtgactaatgtaactaaagtataacttctcagttgtaaaaaaaaaatgtatccttgtttatacatctccatcaattgcatgcaaaaacacttacatcataataaaatgatttctcttaacaataccttaaaccaaattaataaagaaagaataacctagaaaaaactgtaaaaaaggtaatgaggggttattatcagcatataagattagaaaaataagaaaaaaatgctatcattctaatctgaaatgtctgaaatataaaatcaaaacgatccctggcctggcaagatatctgaaacagttcaatactggcacttatatcttgggggtaaccaacagatgtctacttggacttaaggcctgctttataggagagaacacatgtctagtacagtaaatctatgagctactcttggctggagagatcataggtcctaaaagagaatgtagcactgccattttccaaaatcaatataacatgtaactcacccgaaatactcataaccacagatacctgaagctctcacctctcatagaagaagcttctttgtgcagtagacaacagctgctacagagatctaccaatggtcaaaatacagagaatatgtggccatggtgtataggtctccaatttacacatctataatataacctctatacctaagtctcagagaacattgcagaacagggagtattttaagggccagacagtagctctacacatgaaagggatgctgtccccaagatttctcaataatatggttgcctaaacaagaactgaatactaatcacatcactcaacatgacaatatgggtgagggaacttcactaggccctatatcaagatgaaggctacaggtagtaactgactggtgaatgagggagaatgcattttccctgggaatgatcctcatgacaggctatcaaatcccaagtggtcagttacttccctgtatatactgtatgtacatcacttgtatatatgaagaacaccaagtgaactcagtaggttgatgtgacaataatcataagagaagttaggaatttgacagggaaaataggaggaataatgtaaagagtattcacacagagaaccagtctctctcatgatgttcctctggctagtcaaatctcaagaggtaacataatagtgaagtgaatatagttttatgctcattgacttggtaagagtcaggatatataaaatgctgatcatttgtacctttactcttatgttgtattttatttcaatatctgcaataattcaccactccacacttagataattgcatgtgcaccagatactattgcagcgtctctttcactgctagacggcagagtcatgtgccaccctatgaaagtattctagttgtggctcacactctaattttacatgtgaaagatacggaatttccttttagactgatttctatagcagtttttaatatgttggcaaaaacaaaatacaagaaaaatgttactaaaataatatcaaaatgagacgttaacattcagtattataccataatggaggtatatattttagaatctaatttcaaattgttttaaagaacagtgggagtgggaaaaatcacaattccagaaactagtgattaagacacaaaaatgtatttttgttgctttttaaattttgttttattttgtttttccagacaggatttctctgtatgctatcacagaacttgctctatagaccaggctgggctcaaattcacagagatccacctgcctctgcctccaaatggctgggattaaagatgtgcaccaccacctcctggcttgttgcttattttttctttggttatatttacaaaccaatcacagtttcccctcccacccctctcctccctgcccccatccattcctcctccaatattttggaggcaggccttacatattaaatatcagccagccatggtatataaagttacagtgagacttacacttcaatttctcatgtgtaaatttttaaatgtgaagatgagtattataaccttgtattttaaaaatttcaattagtgttaaatcaatttgaaatatcattctacctacaagttcattgtcaaagatatataaattccttagcagctaaaactaagctctgtgtgtctaattacagatgcatttttgaaatacaccatttcaatgttatcttatataaaatgtaagatgattatttaatatctattgtttacctaattaagagacccaggtcaaagtcctttttaatgagttgactagttaactgaaggacatttcctgttccctaccttatatttctcaaatgttgtaggaaatgggccaatcttcatttgatcaccctattttatgatctataacttcttttttttggctgtagatgttgagactttgcagaatcagaatgttaaaatactattttaaaattctttatacagcataactcctgaatttctgttcattaacttcatgcaaaaatcattcccaataatgaaggactccaatagatcaagacgacttatatgaatgtattcatatttcatgctaattatnnnnnnnnnnnnnnnnnnnnnnnnnnnnnnnnnnnnnnnnnnnnnnnnnnnnnnnagatgtgtctctgtcctagattgctcattaaatgtgctatagttcatttgaacactgcatcactgtgactgaattagacatttcagaatccaaggcctatgattttcttcctctgtgaatttcttactaaggcttacaagcaaagctctggtagcagtgaaataatacatacagcagtcgatatgttctgtaactatataaacaaggttatcataaaggtagactggtatctgcaatgtctccattgtgcatgcaggtaatatacccagtatctgacaaggtttgagaagtagcaatccttattctttttaatggggacctctgagaccaacactgtctagaaaaatagcatgctcacagttatatagagacttttcctagattactgcatccaacacacacacacacacacacacacacacacacacacacacacacacacacacacacttacttctttaaaatttaagttgcagaaagaaagtttacaggagaataaaattgtaatgtatttctgcctgaaatataacggtatgaatctagtttttatatgtgacagaaggaggttatgttaaaatagcacaatggtgcagaggtctcaagtgtggattaatttttaaatcattacatggtgatagtttgatttctatatatttcctagtccagtgtaatgaaagaacattgctggaggatgaagttttgacttttcatgcagaatcagttctatatgatcgcacagtaagatattttgcagacgtgacgagtccacactgatttctactctcctatttttggaactgtaaggtaacaacaacaaaagcctatctctaccatatacaccgcttttaagtctaatctacatcatcatacttgtttactcagaataaatgtgagaatgaaaagagactgcaaaattacaacaattttcaatcactcctgacttcatgttaatttctatgtctaaagtataacaaagtgctatcagaaaatatctgtactttcttgtgtttccatttttagcatttataaaatatattttctatttgtttgaaatcctaaagcagtatcacaaataaatgcacacattaacaattaccaacctattttttaaaaaccaaattaatggtttcaaattctcataaagttgaaatgcctactaaattataagtaataaagaagtaatatgttcatttttttaattctcagaaaagnnnnnnnnnnnnnnnnnnnnnnnnnnnnnnnnnnnnnnnngattatggcaaaaatttaaaaaccaaatctaaagggttatcatcaaaagaaataaaattaaagcacttctgtgtgtctatgttcactggagaatttttttaattcaatacctatccatgggtttagaattgtgcagatatgaatttaattacatttattagtgaagagcttgaaagatactttgattcaccaacataagacaaaaatactacccattactttgaaggcaaaagcaaatatatctcattgagtttgaggctaacctactctttggagtaactttttcaaaacagaaaaaaataataaaagtttcaatttatttggaaggtttggtaaagcacagtctaaagactaacaatatattataaataagagacaactaacagatggcagagtgtgggactcagtgggaacagcacttgcctaccaagcatgtggacttcagttcacgctctattaaaaaaaatgtttggccggctaactgagaagctggcttcagtaatacacatggaacttataggtaaaagagttagtactcagtgacagaactgggtacttaatgaaggtagtagaagtcataacattgaaaaggactcaccttaacccgccctccatcatttagatgaaagaacaatagatacatcaaaaacaattccatgatcactatcaaaaaaacaaaaaacaaaaaaaaaacctatgggctattttgacatcattacttgtataatgcaattacttttctaataccttaagaagattaaagtaatatttatgcaaataagcaagcatatacataacattgccacaacattttacatattgtggggtttgaattaaaaagtgaagttagggacttatatgatttttcagatttaacttctttttccccttaaaaaacttagatgtaattgcatgtaaagtaaaaaagaaacataggtagattcagtgtttacatgtgaccctgatgttgaaagctctggcttccttgggcgtcacatgaatgttccccttgctgtagtccctttgttcagtcatgaatgaaatggctactgatgctctctaaataaaagcctcctattccctgagcagaagcaggtgctatcgaatagctactgtttgcacagtgactttctagacaaaaactttacacaaaaggaaaatacaaataattcctgggcagcctcctttgtaagtctctcagacaatagtccagctgcagtgataccacctgcgccattttttaaggtcagttttgtatcaacacctttttatacaggtactaccaaaatatttatgaggcacacattgtgaagtattcaacattcggggttgtaatttcattacttgctgaaagtcttagaataaggtatttattaccaataatcttgtttccaggttctggctattacaaataatgctaccatgaagatagttcaacagatgtccttgtatgaatgtacatcttttgggtatacgcctaagagtggaattgctggatcttgtggtaaactgattcccattttcctgaggaaccaccatactgatttccaaagtggctgtacaagttggcacttccaccagcagtggaggagtgttgccatttctccacatcctctctagaataaactgccattgaagtttttgattttagccattctgacaggagtaagatggtatctcagagttgttttgatttgcatttccctgatggctaaggaggttgaacactttcttatgtgtctttcagccattttacattcctcattcctctattgnnnnnnnnnnnnnnnnnnnnnnnnnnnnnnnnnnnnnnnnnnnnnnnnnnnnnnnnnnnnnnnnnnnnnnnnnnnnnnnnnnnnttaaattttggagaggagatcagccctctgtcagatgtggggttggtgaatatcttttcccattctgtgggctgccgttttgtcttgttgactatgtcctttgccttacagaagcttctcaggtcccatttgttaattgtcgatctcagtgtctgagctactggtattatgttcaggaagctgtctcctgtaccaattcattcaagggtacttcccagtttctgttctaattggttcagtctgcctggatatatgtggaggtctttgatccatttggacttaagttttgtgcattgtgacagatatggatctatctgcagtcttccacatgccagaatccggttatggcagaaccatttgttgaaattgttttcattattcgattgtagaattttagctttttttccaaaactcagatattcatagttttgtgggttcatatcagggtttttaattcgattccattggtctacctgtctatttttgtgccaattccaagttgttttcaggactatagctctataatagagcttgaagtctgggatggtgatgcctctggaagttcttttattgtacagggatgttttggctatcctgggccttttgtttctttctttcaaggtctgtgaagaattgtgctggtattttgatggggattgcattgaatctgtggattgcgtttggcaagactgccacttttactatgttgatcctacctatccaagatcatgggagatctttcaattttctaatgtattctttaatttctttctttaaaaactcaaagctcttgctatacaggtcttccacttatttggttagtgttatcccaagatattttatgttgtttgtggctattgtaaagggtgatgtttctctgatttctttctcagcccatttatcattagtatataaaagggctactgattttttttagttaatcttgtatcctgccactttgctgaaggtgataatcagctgtcagagttccctggtagggtttttttgggtcacttacgtaaactatcatatcatctgcaaacaatgaaagcttgacttcttcctttctgatttgtatacccttaatccttttgttgactgattgctccagatagaacttcaagtacaatattgaagagatatggagacagtggacaacccaaacatagtattactcactcatatatggattttacacatagaggaaaggaatatcagcctacagttcacactgccagagatctaggaaacaaggagaaccctaagagagacatacatggtctcccagagaaggggaaagggacaagatctcctgagcaaattgggagcatgcggggagcagagagggagctaggagaaagagatggggagaagaggaggggtgaggaggacatgatggagcaggaaggttgagtcagaggaagaataggaaaacaagaaaagggataccatattggagggagccataggtttaaagagaaatcaggcactaggaaaatgtccagatatctacaaggatgacaccaactaacaatctaagcaatagtagagaggcaacttaaatgctctcccctgatagagactgatgaataacttatattccatcctagagccttcatccagcagctgatggaagtagaaccagacacccaaagctaaacactgaactgaactggaatcctgtttcagagagggaagagttatgagcaaagtggtcaagaccacagatacagctgccctgaacaaatgtgatttcatggaccccagactgatacctgggaaaccagcctaggactgatccagaccccatgattgtgggtgtcagtgaggagccctcagaaatctatggggcctcttgtacttgatctaatgataagtactgatcaatatttatccctagcacaggaatggactttgggagcccattctatatagagggatactctctcagcctagacagagcagggaggacctaggccatatcacaaaggatatgacagaatctgaagatactccatggaaggactaaccctccctagggagcagaaagggtatgggataagtagggtgttattcggggggcagagaaggagagggagagagaactgggattgacatataaaacaatgttgtttctaatgtaaatgtaaacatggaaaaaagtcatacatcacaaagaatttaacatagatgctacattctaaacaatagggaggaaaatgaatgacatcatttgtcttttatcatgctttgtatataatacagcaccacttgtgtcatgttttggaagcattatcaacagtataatttattttcagcaaactctattgcagaaggagaccataggtattctaagtgttgattaagcaatatttgaaaaaaaattttatacctgtgaggaaaacaaggcattctgcctataaaccagtaacaagataatcaggataaatctattaatctgggtaaaaaattcctcagttcttagaggacaagaagaaagtaaaacaaaagttcctcccataacaaatacactgaaagatcaagagggccacctgcagtttgacagtcaaagacatgaaaatttctcaaataatcttaaaaatattgtttctgaggatgaaagaaatcccaagagccttaagttacacttgattagaaaagcatataactacttaattcagattaattaaaaatttgatatatcttagtttgacatctatgatgttttcatcatgtttaatttttaccattatacaggaatgcgtttaacaattaaatcatgttttgagtagttggttcctctttatctttgaaggtaataggaacaagtcctataacatatactgcacttgattatgaattaggcagtcatattagtctacacaaaacagctttcatctttttaagtcactatcaaaatacaaagttaacattagacaagatcacataagaggactaatacacataagaattcacagagactatgacaacaaacttaagatcggcacaggttaacatatgactgcagaactgaaaaggagaagtgtacacaaagtcccaccactaaccaagagtttgtatgagattgatggcagataaggaagggaatatggatcagtcaatcatactccagggaaggacccctgtcccatgccccagagttgttatccaacacaaaatggactcttttgtccatatttgcaattgtgaactttttgttttgtttccttctattggttttgtttatttggggaagggtttgtttgtttgtttgtttgttttgggagaaataacatgaaattgggtgggcagggaagtgcaaaggatcttggaggagggtgcatggggaaagaatgtgatcaaaacacattatctgaaaagttgaacacagttttaaatgcgttatttgcttttgtttaagtctcattttcacattcggatgagaatgattttcaaaaacatctcagtccaactcagccctaggaagaatattaatgtcttcatgaaccacatgagatccacacttagataacagtggctcagatactctctaaggattttaagtactatcacagtatatcatttaccaggattctggagtgttatcacaggcaatgatactcgaatttagtatcattggatactagataaaagacaagtaaggctatcaatattcttgcgggaatgacacagtatttccaattttcagcttctacaatggagaggaatctctttcatctaacattcaggagaaggtggcagaaacattttagtaatatgctataccacttacaaaattacatgattatgaatctgtataaatggaatattggattttattcattcattttcataccctgggagcaagagagagagagaactgcaaataaatgggataattcctaaataatttctgaataggttttagtttatatatattataaattactatccaagctacaatgttattctttatcaaatgtgcttatgtgttaatgattatttatcatttctccaatcatttttaggttttgttaatattttggatttcactattacttaccatttgttgatttcatttttgaactacaacacagtttatagtatatccttgaatttgagagtcctgtgaaatatagattctatatgtttatcactcaagatttttaacattcatttacacaatggtaaattttaagactttatatgcacaagacccagagttcttatcagatatacaaaaaggatactgcacatcaaggtttcacctaagataaagagacttttgcttctccaagtgtcaaagtcatttaaagaaccaagagtcaagctagaccctacatgctccaatagtttttgcatatgtatatgtaacatttggcagtgaatgataacgagaactattgtaaaactgacttcccatcacaaacacacatccaaaagttaattactacttattataagggagttccacaagacacagtcacaggcacacatgcatacaatcaaagagctttacataaatccaaacagttcaatcaagggtttctttacactatgtttcaagttcattctcactacaaaggctttcaagtaatcacattacccagtctttgttaaaatgcattgatagtcaagcccgtgttaactagattttctgaacacagaagtgaataggtcaaccataatactgcacaggcaagagcttgaattttctttgtcttttaagatttttttaaatccagtgaatgttgcaattgagtaaaggaagacttaaaatactggagtcttggttgacattagcaatttgatatattcctccaaggttctatttcacatattgaggtgacaattttctttcctgatttttataaactttactaaaagctttcatttttttggaaggctttttttatgttgtcactaaaagctatatcatcaatacttgcaatagaattaaaatggactaaacatcaaatactttattgcaaaaaataaaattattcagatagttattccaaagagatgtgacataagtacccttatatgataagtatgcatatggaaacattatttttaaagctgtaattggatttacttcaggcttagaaacatagggggtacactggtaaacaaacagttgaacatacataggaaatgagtgtcagaattctagaatttttttttggttggaataatgccaatctgaaaatattaggtaaaaacatggaaatagtggataaaagaaatctgggaagtgaaggaagaatgaacaggtactttatggtgaagtggtatatatgatgttatatacatgccattatatgtttgtccaaacatagaggactatgtaggagaaataataaaccacaatcttaataatagagaaaagtagaagcacaaacaaaaaagcagggaatgctttccatttatttttttcctgaaccttaaacaaccataaaatagtctgctaaccaaaacaataacatgtcaatcatttatgagtagataattaagtgtatggtaatgagagcatgatttctacaaaaattagtatacacaaaacatgatacaaagctcttcccctataatgagattgatgactaccttaattgccatcctagagccttcatccagtagctaatttaagtagaagcaggcacccacagctaagcactgagccatacaccgtaaatccagttgaagagagatgagcaaaggagccaagactatactggagaaacccacagaaatagttgacctgatctagtgagagtacagagaccccagtcataaaactggggaaccagcattgaacggaactaagcactctgaatgtgggtgccagctaggaagcctaggcagtctatggggcctctaacagtggagccagtgtttattcctagggcacaaatggactttgggagcccattccctatggagggatactattgcagcccacatacgtgaaagagggcctaggccctcccccaaatgatgtgaaagactttgaagatcccctgtggaaggcctcacttgggaaatgggtgggggatgggttggggggttggtggggacatgagagggcgagggaatggggggattgatatgtaaaataagacagtgtctaaaataaaaataaataaaaatgataaaagaacatggtacaaaactaaaatctgcccccctctggcacactttcctacagtactgttatgtggcattgttatagcagacttaggggtatgctgattgaacatttcagcctttcaaatgtagaacttaacaaactacttttctttactgtgaatttagcctcacttattttgttaaagtaagagcaaatggacgaatgtacttactttgctgtggctgacaatatatttaaaaaatatcttaaattctgtgtgtgtgtgtgtgtgtgtgtgtgtgtgtgtgtgtgtgtgtgtctgtgtctgtgtgtatgtaataaatgtgtgtgtataacacatttattcttaacttacaagatgctttgaatttcctgatctctatacaaataagaaattagagaattattaaaataacaagtaagttgtattgtattaatatttaaagattcatttatttatatgaaagatttgtctgtatgtcagtagagaacacaagatcacattatagataggtgttagacaccaatggttgttgggaattgaactcaggacctatggaagaatagtcagtgctcttaaccactaagccacttttccagctcctgggttgaactttattttaaatgactaatcaacaagtgaaaatacataggcatgaaatattgatgacaagagactttcactttttcacaatctgatttgatgtttaaacacatcttttgctaactaacaacttgcaacaggttttgcaagcacaacaatttcctttctcaacttggcaactaagactcttatatttatatgcttctctcaagtcctggctagacaccataccaaatcttggcagaaaatctgaagtacaagtaatctatggcaggtcacctccattcacatagctttttctcctattaagtttatctgggcttcacacacataaaatgtaacaaaatgaataaataaaataagaataaataaaaagccactaatcaaggaaagaggatctgtgaattatttttctttcttttgttttgtaagtcacaacactgtagccttctatttatgtaatgtgaccatcactgaaatatgttgaaaaaagtgctattgaaactccctacgaggaattacaggcacctattgctcccaaaaagttgcaccataagtgcaatggctagttttaaaaaccatacgttacataaaatgagtttccatgaatttaattaacaacaatatgctttaatttatctgtatcatctccagaaaagtactaaaagaaagggagtaacagctacccccagatatacttcataaacaaaagtaaactaagaaaagtgacatattatcctgagattcacctctgaattaacaaccccataaaaacatttgaactaaatgtgaattcatataaatgcatgcgtgttgatttatataaattttactgtatgtatgtccattgactttaataagactatttatgatctttgaaaatgaacattctttcctttacatcattaaaaaggaaggttaaaacctctaaactactgatatacagtgcataatatttatagatgaaaattaacacaggaatggcagtctcttccttaaaggtccacattaaaaagatttggcaattatcaagggtcatttgagaaacacacttcagagttaaggtttattgctaattatgtttgataaatattaaaataaatacatttcaagtcaagtaccctgaaattcatttctgacagttccaaggaaagtggtgtccaatgtcaaagccagctttacaacagggttttcttgacagatctcagaaacttcatgctataccaaggattaaaaatcctgacattcaaccttaaccagaagagcgaaccactaagtttcttctaccataactgatatattttgtctgctatcaagacaactctaatgagcaacagcatgagctgaggcaactcctgacaaactagatagacatgatgattgaaatcaggaagaactcttccagattaatacaaggaaacagtgacattagttaaatataatacagctaaggatggggtggctccttttatacaatttcctttgagaagacatggaagcaacttggcctagttactccattgtgcaaaatagtaccacgatcttgaaaagagcaacaaagacagaacattaatggctagttgttcacaaaacaatagtttataatacatacaatctcgaattataaagtatgatgaagactccaaattgtccttgatattacttatagtagcacatgatatatgctaaaataagaggcaagggggaatattccagaataagaggccaagaataatactgatttttatatttccagatgttttcactttctggtaaattacataactcattggcaacatgagatgttctctgagtcaaaagagaataacttaacctctagaaaagctccacactattttttctaataaattagccaccagtgagtttgtgatttatgaaaagaaagattaaatgttgatttcacacatgcagaactacaccaactatagatccagatggaaacagaaaaaaaaatgtcttcactaatgttttgggagctaatggtgttcttcaaacacacccttttcacaggattccaatctgaggataatatatcagtatattaatatacagttaattataggtcctgatataattatttaaattatatatcacaaaccactaagtggcttttaaagacattcacagcaacaaaactacttaagtataggtttatcagaagtaaagatactattcaagaattgataaatttttactttttactttgaatatatatcctaattttcattatatcactctctgaaaactggccaaggaagcatcttgtacaaagagaggttgtgagaaagtggttgctttaactaaagaaacaaccttattgagaaaaactgcttaaatgaatatgcaaatgaatacaaggggggaaagcacaataaaacatcagataggaaaaaggataaggatattggatagtttttacaataagaatctaaaaaggattttcctaagcctggttagttaaagaaggaaaacagggaaaaacgataaggagaaccacaaaattcagccacttttactgcacatcagtgaaaatcaaaaataagatgttagaaaatgaaccacaggtagatttatgaaggataatacacatatgtgattagaaagtaacatttttaataatctgccatttccaaaataatgctggctaaacttcaagattggcttacctttacctatgaaatatttatatatttatatatttggttatttttgtgtagctttatattatttatatgatttctaaatatgtaaatgtgctgccaaattctccttgagttttaaaaatgtgatcacaatcatatccttaacgaagtgaataaaatatccccattttaaatgacaataaatgactttcaggataaatttctaaagcactcaaacctgaaataaaagtcattcaaaaattggatatatttctaattcatactcttactttaaacttatatactaatatgcaagaataacaataaaatgatatccaatattcatataacacagtgggccacaccactattctcaaattttcctatctttgcctctcatgaaaatgataatttaatttgtgggcattgatgaacttatcccagaattaatattatgattattctactatttgacaaatgaaggaattcagatatttagaggttatgccatttgccaaagggcactggactaggaagtgtccgtgtgattacaaaaccagcagtttgacttcagagtttattaccattatatctgacactggaacttaaggatctctttgctgctgtggaaaaagctgatggtctattgcaaggagtttttaactgacaaatgtctgtccaaacttagttttcagcgagtagaagctaagaattgatctgcttcatgtcgtcgtaaaggtggaagctcagaatttatgaagggattaggaaaaatgattaaaacatgatgtttcatgaaataggctagagaaaatgaatgaacagaaaaaaagcaaggcaaaatacacagcaaaagtaatatcagaaatcggaaaaaatacacatatttgctggaacatataaattaataacaatagtaataatagcaatgataaataaatcaatctaaggaccaaatccaagaaaagattgctgcattataactacatcaacttggttctcagacagactcctttaaagaacatgagaaatttgtctataaattttctttgtttttgtttgcttgtttcattcattcattctttctttctttctcaactattacttaagcttacatactgatcctaactacctctttttcattcctctgccatttgttttaactgaggagttaggtcctgggatcttagaaactgttaatagcagtggaataccaggcaaagacaaggattggtaggtactgattatagagcaaaagaatctacatgatgttctcatgaaaacacacaagagtccaagtgcccttttataatgccactttttatttctatttcttttccatgcttatttcctggcatcgtggtatgcctaattacagaggagtcacaggtaatgaattacagaagtggaaagacaagctttctgtgatgggcagtaaggactcagtgctgttaaaattgcttgcctgctgatgctgagaagttataggcatcaaagctaattcagtaactaagagacaaaggtgttacagcctctaatttctttaatgctctagcactagagccccaactactgaggcacactgacaagcacaggaagtgacagatgacagcgagggagatgacaaaatacctaccaaaggcaaacattacaactattaagtgacagcagactgggaccatgagcctctgctggtattctctctgcatctctctccaactgaaaactgacaagcaagaacacagtagctgtccacccccttttctccatgcctattttctgctcaatgaacacatgaaggaaggagagaggtgggcagagttatttctccagtctccttggttttatctgtatttagtcaacggctgcctctttttcctgaaaaggtgtccagataacagtccgaggcaatgctcaactttgagcaactttcttaacaaatttctgagggtatcctgcagagacatcatcctatactttcaatttacttttctgcagtgaatttttcactcatcccccaatgtttaagcttactactctgttgtatgtcataaacaccaaagattatgcataagtaatacacactcatccccataaaactgagggtctcattcatacacacacacacattttatttgcatgcacacatcattgtgtatgtaaaggcacatgggggagtgctcacaaagacatgtggacctccatagctcctggcaatgaaattacaggtagttgtgagcaactctgcgtgtaagatgggaccctaaccccattcctctgcaaaagtcacacatcctttaaccactgacacctgttgcgagccagccttgcccttttgtatctgggagaaacaaacagaaatgtatggttttacatccaataaccacaatcaaaaaacacagtcttgactaaaattccaaattcattcaaacaaaggctttgtcatcatttgaagagaataattcaccacacctgcccatgccttcctcatacccccaggcctactcagtgcattctgcaaataatgaggattttctcatttactattaataatagccttgtaagacacttattgttaactttgatttagtgtctgtcccaagccgcaaaacagttaaatcgctctctgaaagttacacagaaaatgtacaaaacagcatttcaatccatttattcattcctgtgattttctcacttatggaactactctcaaaagattctaaatatcaccaaattagcacatatcattttcctgtacaactatttatgaaaattgccataagtcctagattaaggatgccgcaggtggaaagtttggtttgtttttttttttttatactacttatattttcacttccattagagtatacaaaaatggcttactgcatggactttacctgtggacaaagcatccagaatcaaactgagcaggctcaatgcccagttctgtcatttctgtgagatcttaggggagtcacttaaccatctggagcttcaactattgaaatgttttccctaattaccgttcaaaattattacatacttcaaagagatatgaagattgaaagacagattatatataacatagtacagtaaaatctttccataaatgttgactattgtttttcttaagtttgatcctgtactccttaagaactatgtgtttcagcaccataattacatgaggacattttctctaaaataccttgtgagataagaaaccatgtctggtatttttacatttcaatttggcaaaagtctcttcatttttcagaaccaaaaattcctcccaaaatgacacctcttcatctgtgtaacacaaaatgaacattgcctaggtagttctcaaacctagggaactatacggattctgacattacaacatattcttcatctctacacttgttcattagactatgaacccttcaacgtgaggagtcacattttaagcagccaaaataaaactgaaaacacagtagattctcaagaagtaggaataaataaaacaagaaaagcctaagcaacacatcatgtacttgctaaagaaaattttggagaactataattcgatagtttcagggattactgaagaagtcttgtgagtactctaattgatataaaggtatacattctaagatgagacttcttatcatcaactatttaatttgaagggacagcaaacaaaaaagtacagaaaagtttacaggaactgaattggttctaagacaacaatcgttttttttttttcaaatcaaataaaattctactaaaaatagacaggaaatatgagtgtgaaatgaattttaaggacttacatgtggcaaagaacacagtttgtttacattttctaagcagaaatgtcatagcagttaaagggtaatatatataaattgttgctttcactgaggtatagtatgaatatatcttcagcacgcaaatacatttagtgactagtaataatacagttaagtcacaggaagcagaagtttaggatgccctttaaggaaaaaaagtatttgtttcctttgccaaaagctatcattaaactacgaatacagcatccctcatttaatctaataatactaagtctatgttagtgaacaatgacatttgtaatgaaaacatcaattgcacatatgatagctggatgtctactttgtacatctgagaactaaattcatcattttacctttaatatttatgctacacacggaaacatttcaaaatatattaaaagtacgacataataaaaaatgatcacagtatttagataaaatgggaaaatctaacaaagttcatgagtcattgaagaactttaacaaaatggagatgactatgtttggtatgaatgcagccctacatacagaaaacaaataacctctcaagatctactgaaatcagaggaacctcaaaaaaaaaaaggctcacaaaattaaaccagctggatttacaatccatatttaccagtaaccagtaatcttatgattcctagacatcatacaaagcttaataagattagatccatataattaaaagttcaagattttagagtcataaaatagaaatgagaaaacaaattacaaataatagttatcatattctaacatttctttgttatctttgtttcattgtgggcctatataggagtatgactataggtcaatgtatgtatacataagttcaacttgagtataaaaaaacactgagataaacacaaatgccaatgtaccaatacttctggaatatccaatttcatatcatccaaatgcatggcaaatataacacacacatacattcactgtgaatgattcaagtatagcaacttaaactaagtatctattaaataagaattctggtggtgacctaaattttcacacaacacatactcaaattaaggcaatatttaatgaactcgcggtttttactaagaaaaataatgaggaaaatttggccttatcattacacaatttcttaacaaatgtgacagcattgtcaatgagaattcaactacctagttagtttctgtcaacattttactgacaaaaatgccctaatagaatccttgaccttcaataaagagtttaaatgcatcaaatacaaatcattaagtatttttcaaaggcatacaataacaattctgacattttacaaggtcattttagaagtataaatgaataaaggtttcattgtgtaaaatcactaacataacttttattaaattgtataaaattaaaattaataaggtcaatcatagcaatgttttcttttgctagtattaaaaactatttaaaaaataatttgaatcaaattatggatattttatcattcccagccattatatttcactgtgaatgaagcagtatgagcatgaaacttctacatggtgattagcttccaaaggaaaaactatgaatttcagcaatttttaagcatcttcctgcatttgatgtctaggtggagagcagttaacaagtaagcataaaatgtaatatagcactttacagatgcctaaggtaaaaacatgatgaaaaatacctaataatttatctttaaatctttattttttaagattaattatttaaagagaactacctgttttgattggaagtgtatttcttcagttcttgtatacttgtgcatgcatgtgttcagagacaggtttttaaaaatactagtcaagcatcacaccctaatcccttgataagttttgcatttgatgtggatgtctgatttcacacttgctaatcaggatatgacaccaagaaactgtaccatttaggtgttaactaccttaaactatattagactactttcaaatatttagtatttacagagaacaagaacacatattaatcatttaccaatagtctattttgcaaatattgatgcatgaatactgcatttaattattatacattaataacacttgccatttttccatgattgtttggaactgttttatttcaattaaatatctaagagaacatctattgaggactgggttgtgagaaataatgtagcaaaggaaaacaacaacaaaaatataaatccttctgtctggccgagtttattattttagtttctatgcaatgtgcttttgtagctgaacatatccagctatgtatcatcctcaatggaatccatggttcattcttccattagcccccaaaattttatatttcctttctattatctcaatgagtagtatcatcttcagtggtcctaaagtcaataaattttgataaggctttcattcattctaactgaacatgaagtagttaaaaccacatatattttccactctgaaaaatctaagattttcttctgccttcttctgattttactgtctcagaaatagccagtctgtttaaaccactttatatcttcttgaaatatttcactctttgctgtcttttcagactatattttcttcatccaactacttccttgttggcatttagtttattgtgtgatccttttctacactttcacaaaatttggtatgtgaggaattttccaggggccagcactgttgtgtttttattttttgtttggtttggatttttattattcatttctattctatgtctttaggtaagttttacatttttcatacaagatctaactatgtagtccagcttggcctccatatgtagcctaagctacacacaaactttcaaatttcttgcctcaacagttaagtattttaggattacaggcctgtaccactatagctagcttcatttccatggtggttaatgtcacacatgtgtagactagccctaaatcctacacagtctctctctagctgaaacccaaacattcttctgaaaccaatttacaatatataaattaccaacagcatgtggtcttctaactttctttcttcagaaatttattatatcagaagataaatttggtgttctcttccttcccatcatcaatcttgttacagaagcaagaaatgcggggatcagattttacttcaacatcttctctgccaccttccatcgtttaccaagtcactaataccagttaatttctctctgaatatttatcttcttccttagcaatgctattggcactatcttagtttgaatcctcaaaatctgtaaattaagactattatttgaaagcctcctagaagtactgctaacgatctttaacattcttatcctaaatgttcatcagtaaaacacagtttgatcacaccactgaaaatctctgattaaaatctagtgaagattaccagaaatgttcccaacttacaaactgagtcagcaaccacatatcctttgtaacacatcctccaaccatatttttaattaaatgatgattgaaaagttcacatatgtacacacacacacacacacacacacacacacacacacacaccacacacttcctcatctctctattactactatccatgtctattgctgctcttctagaccagtctgtttctcacattcaagtcaattcattttgttttgtgatcaacaaaatttaatctgtgagaccatagattttggaagtattcactagagcctggtgggcttagtggagacaatgactccccatcttcaggatgcatcaccagccaaagtttcagcagtaagatacaggttcacattagcccatctctaatcactgagtgattgctcaaccaaacaatgatcaatagattttcatgaatactaagaaaattagtttttcctgtctctctatagtaattatgacagtgtaataaagcagttacttgctatcaataccccctcctattctctgagctcgaatctattttgataacacaattcttacaaatatacaaaaatgcaaaatgtagattgctaatgacaccataatttaagtcattagaccaaaaacactcattgtaccttaaataaaaggaacacaaaaccctactattcagagaagtggccaaagtcattttgaaatatgactgtggtctaaaagagaaggaaacagagatgtttgatacagcatgattaatgttctaacttactatataatacttgtttatgttgagaaaatttgattatagatttttttctcacatatttcctattagaagcaagtgccaaatattcaaggggaatatggcaaatagcatggcttatattcaaaagaaaaaaggtaaactcttctattatgtggtattattatgctggtattatgactgtcctttatctttatgaccttctgacagttcttattcaggtttaatgccaaccaaccagtgaaaatactattaccaataattttcctagtttcaaaggtctgaatatatacacaaagcctaatactcttcatataagaacttcaggacagaaaaacagtctagcagtaagcatagcaagtatattcacctatgcctgtgaagcacatatctatcaattttaaattactattacaaatttcagtgatcatggaaattaagcttagatacatttcaatgtgcttgatcacagtaaatccacccacctaaaaggagatactgagtaaaacaagtattattccccatatattattatacaccagaacatttgtttcttcattactacattccagctatgttgggagcataccttctttctaaataagtgttgccaaatttgaagcaatatcagtaactgcactggtggcttctaccacatcactaccatagggacagagaatacagtgtgttggctgcatatggattcacatatgtacaataaaaatggtgatttttataatgcactaacctaacttatataagcactacttgattaaaaagacttctgatagctactgatatgaagttactttatccaaacttgatagctaataaaaaagtgatgatttgttggagagcctaatgaatagtaaaagagaagataatggttatacaattatgcaaattcataaactgttacacagtttttaaaagttcaagaaatagtatgcctaggtctcaatcttcattatcctgttattatatgtgttattttgaccaagataattcatgtctctatgtatttttcttcatgtataaaaggaacaaataattgtaatcacaaagaattataaagaaaaaacttatttaatgcacttaagagaataataacattgtttgacactgagcatcaaaggctatatcatagtaagctattataattgtcatctattttcaatcttctatttgtgagtacattcaatctagttttcctttttaaatgtaaaaacctaaaataatatcaggaggtgtgaaaaatacaattaaatatgttacatgaggaaatacagagttactctgaaaggaaatgccaagatattgagattccactgatactggcaagataatgaagatgaatatcattctgcagggtaacatcagcattattcacaacagagagacaaaaataataatttttacaaagttagtttccagccagtaagggaaagataaaatgaaggaagcaaaaggaccagcatatggtagtcagaggacactgtagtctctgtggatgtagatctgaaggttgagagcttagcaagtagactcactgttatcaacgtttagtatctcctcagtagggaaaacttggataaagaacaagaagagaacacctaactcctagttactatgttctaggaaggaggccaaaatagtaagatggttttaaacaacaaatggaatgtactttttcagttgtgtacctctatgtgcccactacaataggcttgactttctacctttcataaattcaaaccacaaggtaagaattatttgagtaggccaggatcccatacattctagagcaaagcttgataagctttatttcctggtaaccacattttgtctgagaaatttttaaatgatgaagggagtacaggataaaaaatccagttatacaaaccaaacatttactaatgatgactcataaaaatatttactggcatatacccaaaagatacacattcatacaaaaaggacatctgtttaaccatgtccatagcatcattatttgtaatagccagaacctggtggcttctagatgcccctcaactgaagaattgatggagaaaatttggtacatttacacaatggagtactgcttggcagaaaacaacaacaaacaacaacataatcttgaaattcgcaggcaaatgggtagaactagaagaaacctgagtaaggtaacccagtcacaaaaagacaaacatggtatgtactcactcattcatatatggattttagacacagggcaaaggattatcagcctacaattcacactaccagagaagctgggaaacaaggaccctaagagagacatatatggttccctgggagaacaggaaaggaacaagatctcctgatctaattgggagcatgggggaacggagagggaattaggagaaagagaaagaggaagagaaagggaaaggaggacatgagaaagcaggaagatcgagtcagggaaagaacagaggagagcaagaaaagagataccataatagagggagccattataggtttaaaaagaaatctggcactagggaaatgtccagagatctacaaggttgaccctaactaacaatctaagcaatagccaagaggctaacttaaatgcccttctccgataatgagattgatgagtatccttctatgccatgctagagccttcatccagtagctgatggaagcagaggcagacacccacatctaaacactgaactgaactctggaacccagctgcagaatgggaggagggatgagcaaaggggtcaagagcaggctggagaaacccacagaaacagctgtgctgaacaagggggaactcatggcctccacaaaccagcataggactgagatagaccccctgaaaaaggatgtcagtttggaggtataatattctatgaggcctctggtaatggatcagtatttatccctagtacatgaatggacttaaggagcctactccacatagagggatactctctcagcctagacacatgggggtgggtgtaggccctgctccaaattacatgacagactttaaagataccccatggaaggcctcaccctccctggggagcagaaaggggatgggctaggagtcagtggggagcaggggaagaggagagggagagggaactgagattgacatgtaaaacaagcttatttctaatttaaatttaagaaaaggaaaaaaaaaaactacacagagaaagcctgtctcgcaaaaccaaaagaaaaaaaaaggaatattgtatttttattttgagccatatggtataaaaatctcaaagaaattatccatgtttcttctgtatttttttttaatcaaaggggttttcatcagaataatttcagtaccacacagtcacataaagaatgtaaaactcttggatcacagatttagttggaataagaataaaattatcacaccagagaaaaaaatgttcaatttttaattaattcattcatagtatacaatatgacctcatcctggagtaaatcaaaagaaacatgcagaggtgtaatattcttttgaccaaatagataaacaccagggaaaaaagagtaaaaggttggctttacactcaaatcaaaagtagtacaaaccccaagagttaagcaaacgttaatgctaaagcaatataatttatcactatacagcaacactgaactaattcaaacagtatacttcttaactaggaaaatcttagcagagtatacaaatgatggcctgtctttgttatcacactattttaatcttctaaccactttcacacctatcctaccttcttcacacattcctaacttgatagttagaatgatgtatttatttcataacattacctttggctcaaatcacatatttatgagaaatttgatctcttgggatttttgtccagcatctaattgttcaatgattcccttggcatacattcttgatgataaagtttcaaattccctattatttttaattactttccattatcattacacttaaccccatcctaaataatttcccatcatatgcttcctcatttagaacaatgaatactactaggatttcagaggaactgaattatgtttattcttgtttcttttctgtcagcctctaagttctaaacaagcaaagatcatacctaaaccttaatcacaactatatcctctaagtccaaccctaaaatttatagaagagtaaattctcaatatatagatttgcaaatttaagaatgcaaagaaaaatgaaggtcttgattattactaaaggacccataatttctgaaaataaaaatacatttaatagaaaatataaataatggcattaagcagttattaattttataaaatgaatgcctactgaggtagtaagtatcacccacatatgaccccagtagtctttaatattagtttacttttgcttaattgttcactccattttcatctctacttccatatctaaacttcaagttacagttcaaatggttagttttttgaatatatgcagttttaaatgcaataataggatgaagattaaaaaagatcctggaataaaaatgagaatagtatttctcataactaagcaatgcctttggaaaatatcctccaaagtaataccccgtggttgacttatcatacaacaatttaagcatgggtaaacaacatgtgtaaaatctagtgatttggtctctagaaaattccttaagggatttggaaacgatgattgtctctgatcaaaattattaagcaggatctaaaggatagataaacatggatactagcaggacatgacaagttaaaaaactctgtctctgttttttgagaatataattatttcttctgtgtatctcaatcctaaaggagtaccaattatactagaaaaatagtataatatgataaaatttgacatataatgttgaatgagcaaagaagacaaagagaatagcatcagtggtagcttagaagacttgttagaataatgttatctcattgctactgtaaattagactttatgtagattatcattggtttttagaaactgtacacaaaaataaagttccccaaatcctaccatccactaaaccaagattcatgaaatagtaagtttttactactttgattatgcagatgtccctatctcatgaaagataaacacagagatgttaatatctggtgaaaattattgaaaggccactttgaatttaggcatatgatattaactgcaagatttacaaatgtacttaatcttagagcaaaagttagtttcttaaaatcttcaatcactacttactattggaatttaatgttgtatatatcttataaaatgtactgtctataaccagcaaacctggttgtgtagttaaaatactatttattcaataaagtactatatttctgttttagttagaggaagagggaattgggatttctatgcaaaataagattgtttttaatataaataagaatttactgaaaaatagtcaaaatctttttatgttatcacattattgtctatcttgcctaacaggaacgaatactatacatgctggcatcacaaatgtcagcacttaaagaaataggttgagttaataccacagatttcaggcacagttggtctatgatattggtatttctcttgtatgtatgaaatgaaatggggaaatttataaattatcttccaaagatcctaattatgatttcaataatataaataaattcatatataaaataaacagccatttaaaaaattccaatgtcctaataactctacgtggcaaattctttagttctaatatgtatctcatcactggcaatagtcaggataaaatatattcaactcataaataacttcaaacatgctaaaatgttatgaggtgaatctttaggtacatgcaaatgtacattattaatagaactttgtttcaaagtccattcttatatccttattgtcaatgtttcaaacttaaaataatacttcaagtaaatcctgtaattggacccaaacattacatatgaaagtttaggaaattggagaatctagtctatgtacataaattcagtgaaaaaatactgatgatcttaaatagaagaatcatataattgatcattggcttttaatataggaaatgaaaacaaaacttcatgttaataactaattcagcaatgcggtataaaattcagctttccaaaacatttaaatatattatactttttcatgacatttaattggtttgacatagtataagaaaggatttggacaaggtgacatactgattgcttgtgttcaaaattgcatgtgggcatgcctgctattgacaaccatcacttcatgctagttgtgaatgaccttagaactcgaaaccccacacatcaaaaaactgggatgaatccattaatatttacattataagtatgatgacacattttagatagtaagactgtagtatttctaacagtcctgtgagctggaagcccacagtaaagtttaaaaacattactagcagaatctaatctcatatagctctgccttttaggaaacaatgaatgggagagagtaataatctccattcacaacaagagaaaagagtaatactggttcagcatgttcagcctgtgacataactataaagtacacttggaaaaaatctttacttttcacataaaggagtcttggaatatttccaataaagtcatttcaataaaggcctttttggtaagtatattcaattggaggggttaagacaacaacaacccgtgttaaaggttttccaccttcttccaaaattgaaatgccagcttcaatctctgaggcaacaagatgtgtatatacattccacgaatgaataatactgttcagactgaaaactaactcagagatcatctggatataccttcttagagctgagcacaaatccatggctattcctttcccttcccacaacaatcctggctaccaaataaactgtacaattgaaaatacttgtctcaggtaaactgtctaggactttggtgtctgcaatatatgtttcatatccataaaaaggaacctatattaacaattataagttttgggacaccaagtgaatatacggaatcccagcaatctggcaattaaagccaacaagttcaaatccagttcggctgcttgctagtgagtcaattaatctccctgtgacataagataataaaattatttttaagataccttttttatgaggattaattaagtgaatacaagcaacatatccagaaaaatatgagataaaaaataccctatgaatcaattcagccccgactgtgctatacattctgtcttaagataaaagatgcgttttacttcatatacacatttcttgatgataaatgcatagagtgtacggaatatacacttctctattgacaggcaacacactgcttagagactaaagtgaatgtattagagtttcatgaagtaatttaaacatatttattatagttctagtggtatcaatctggtggtgctgtaactgaacaaacaatataactcatgaatcaagttacaaataacaatgagttgggattaagacaatctacaaagatatggtcaggcaacttaaaaataacatccaaaatagagcccatccatagtaactccttttgacatgaagcaattcaggagcaaatataagacttcatatagtaagtgatgtggaaggaaatattatctgaaaatggacctatgttgcaattttatcttttttcccactgctagaaaattttaaattatttttgggagtccattccccatagagagatactctctcagcctagatatgcaggggagggcctaggccctgccctatatgatatgacagactttgatgatcccctatggaaggcctattcctccttggggagtgaatgaagggggtaggatggggtggtaggtggggggcatggaaagataggaaggagagggattgatatgtaaaaacagattgtttgtaaattaaaatgtttaaaaggaaaaggaaaaaagaaaagaatgtctttggccagtctcagagattataaataggtatatgctaaatataccaaaataagtggaattaaacaattgacttccccttcatatccaaagtgatataaactcagtccactttattaaaagagagcaactacctacaatataaaaatactaaattaagaaaggaaaccgatttgagctacttataaaattcacatggatcaggaaaatctttagattactgcttattaaggaggcccaagtctaattaatgaaattaacttacatatacttattcccaaataaatcacatacaatatataaacattggcagagaattataatctactccctaggaaaactgataacagtattgtaatagattgttgaatctgaaagtgaataataaatataaatatttcatatatattacataaatatactgttatacttttttgaaaacttgatataaaaatcagtttaaaatacatgttatggggttggggaaataactcaagtgatagagtgtctgcctagggaataggaacacctggtctcgaaccatagcttctcatgaactaggtttggtagagcctgtctataatctctgtcctcaggcctattacagtaaactggaaaaaggacaatcaaatatttaaagtcaaccttggctacacattaagtactaggccaacctgggattaagagcactatagcagtaaagagttttcagaaagtgctattataaaaagccaacgttatccagttgttatctactgtaacactggctgctcaaaataattaacagctttctttatcttttccatctatatgttatctattgtttaaattggtttcaacactgcactattgtcaccaagatcatgaattcaatgttcagtaggtcatatagctttgttctgaagtaaggccaggaactctgctccagacaattctcatcatcaactttcctggacatggacaggattaaccacaggctgatgaaatgatcagcttcaaaaattattattaatgaaataaaaaacatcatgccctatggattacagaaatacctttgttatttagtgagagttggtatgactttctagctgaaaatacaacttactaaaataccacagttttcatggattagatttataattgaacatgaaaaataatatggctagaaagtaaaaaaaaattcctgaggaatcctaaagttatactttgccatactgtgaaatgttacaatatagctatcatatacctgaaaacgtgtatctaatctcagaaagttctggaattctatatttgtatgttttcagtcatgccttggaaagtactaagaaactgtcaagttctgttattagtaaaacaaatgtctaaaagctataacacaaaggttttagagccatattctcatttatcttgtagatatattaacatttgataatacaatcaattattaaaacacttaaattgtcagcactgaagagagaagagcattgcagcagaatgaaaatgccaataattagcagtctgtcatctgacactgcaggagcaaaagttaaggcttaggagaggagtgatagcatcttcattattgctcttaatgcaagaaaagctacctaaccgcaccagcttttgtttgccaagaaaattatatcttaatggcgtcacatgttatagagggcttccttttgttggcttccattaaaagaagtccatgctaagaaacaacacatttctcatgtattgtcagcagcatgttatcagtctattcttatcacataaagccagacatagacaactctcaataagccattctagcagaggagataatgggaatactcaatagttatgtttgccatttgaatgtatcacatattttgctgaggctcctataaaagtaatttaaattaaaaactaccacctttaaactcatgtcaatggatagcaaagtgtatgaggaaatgatgctggtaatgcagagagaaatcataatagtattagtagttgccatgagaagaaaaaagcagatcacacatgaatggagaatttaaccaagggtagataataacttaaatatttttccattcatttttgattagttttatattgagagaaatgtttcaacttactctaaagcatttagtggaggaattggttcagtccactatattgccttatgagtatacatttacagggtttaagatcctggggcctcaaacctagacaaagaactacaaacaacctgggaaaaatgatgataccccccgccaaggaagagccccacagctgtttatgctataacaaatggtcagccctgaacacatgtacatacatgtaacactacacagactgaaaaggttgcatttatgcatttaggaggcacagaatacacacacacacacacacacacacacacacacacacacacattatttcttacataagctagatagggtaggcaagaaaaagtacttcgaaagacaaacatctaaacataatattgaacttttgtcatgtgggaaagagaaggccataggaggtctcaaattgagatttctgataatagagctttaatgagtacagttacccacagagaatggaagtagtgtgtgaaaggatgaggctaggaactcaggttgtacacattcatctgatttccatggctttgcttgtgaagcaggaacaggaaattcatgaagcatgtaagttatgtagtcaggctacctgagtttgatttctatgctcagtataaaagacaaaaagggcgttattattatcatctatagtcaagaacagacaacaaggctgagtaaaaaattcatgtacatttcacatagaatctactacatactaacaatatataaatattaatatataatttagaaattgttgattttattgtgagtctatgacataaattcatcttcactcacaacaaaagttttgtgatatagtattagattagcaattatatttcatagttccttaaatagcaatcaaaaaataggaatttcttcgaatttgaacaacaaactacctaagacacatttgtttcatcaaatttctgtattttataatggatcaaccatattattttaagatgttattagctctagtgtaataacatctagagtaaacaaatagctatatatctaccagacttaacgaattaggcatgaaatgcaggacacacgataatgacatattgttgtgaaggctgtattctaataaacctgccacatgaaaagtaacaggcaacatgaaaaagtaaagaaattaggttcacagaaagctagagattcttataacagtttctattccaggaactggaaagagttaaaagtaaattgcctagaagtccacaaaatgttattttatggtccttaagaagagaatgaataatctgtgatatattctacacatgggaatgcattgaaagcaacaaaagaggcaacaaaaggaactgaagctcagcaaggaaagaaatggtataaaacttgtggtttgtcctgaagctgaaaaattgactgacaactgccagaattcctgatactgtgggaagtaaatggtgagtgctgcttctttttcagtcctgaggatatagacagaatcacatgcatgctaaacaagcatttcatcacaaaactacatcccaaccactaaagctgggctttgctaatcatttaattgcagggataatttttgatatacaaattggtaccctaacaatgataactggaaagattaaaatgatttcaacatgatcagtctatgcaaaataacaaaatattaatctactatatctataaaacagcttttaaagttacaattttggattggatttgttatttcacatacaacttcctcaagtgacttacaataaatgtatgacaacacatttactttataaggcattacaaaatatttaaatgtaatgacattaatgataaaatactaatgagtgtaaattaaggttactagaaaactgttatgctcacatattaatgactaacctataataggattaaattcatggtcatctaaaagactgactaaaggtatgtatattcaaagcttcaggaaagtggtttttttctaacttaaatatatttagcagaacacaaaaagtgcttcattcttcttataaaacatacagtctgagattggcttaatatatagttgaaacaaaccataatattttggagctttacatgtacctgttaaaatttatacaattttcaatttaatttatatttgataaaaataaagcaaatttatttagaatgatgattcaaagtgactgaaaagtttgaatttgcgaatgtaattaaaagaacaccttatcctggtgatggtgtcacaggcctttgatcctagcactccagagtcagaggcaggaggatctctgtgagtttgaggccaacctggcatacaaagtagttccaaaaaagccatagctgttacacagagaaatcatgtctcataaaaacaaacaacaaacaaataaaatcctgatacgatgcttagtccatattattcagaaagggggaaaaaaggacagatagcctgtctacctcatatctcagaaaaggaaataaattagtgcaaagcatgtacgatgttatgaatcaaactccaaacattgataatgaaaaatttatttcattaatttatacatgtatccactgtatggtaataaaatattactagacaaataatgccacaaaattatattgtccttaaattacaaataaatgaataggaacaatgaagcagcactttgcaaatggtttgaaaatcagcctcagaccgagaattaatgtcctccaaataaataaatcaatttaaataataaaaaacaaataaatacataaatgacagacccaaaatcatcacactgttttctcagtgatgcattccacagagataatgaaaacagaaaaaaaagacccttaatcatagaaaaaataactttatttccttcagagaataatttgcaacttgcttcttcttgttcctgctctggagaactgtctttagagctagggtaataggatgacacatttcacaagataatacaatatatgtggtactacatcattaactgtgtgaaaaagagctctgttaaactatgcaacaaaatgcgcaaattactaagggcagaaaagtcattaagcctcattgctacaacatagggaagtcattaaaaacaaaccttggctcaaaatcacatttttgtcacttactacctatgaaatcaacaatactcctataaagtcataaattgatctagacttgaaatggagactaaataaaatatggtttcaacaaactgcagtttttataaaatatcagatattacaacatcatactaccattgaaatgattgctgttattaatggtagtcactgtagtgacagtattaattacagaaggattacaatcactgttacaatctgtaaagacagccattttaaaacctccttgcttagaaggctgaaggtagaatatctgaaaatctctctaaagttgctcacttatattgatatatatctcagtctccaaaatttctaattacctcttttacataaaggaatgctaatctgatgatagaaaatgccagtataaaaaaataaatgtgtgagtcactctaaattgaaactattaacatgttaataatgggggattatgtaaggtgataatgataatttacagaaaaataaagaatgaatagacaataaaataatggaattaaatatagctattaaaaaggactgaatgttgctaacgttctcctaaaattcacaggttaaacctaaggctcaaggagatggtattggaaacacagcctctgataggggattccgtcagaacacagaccccatagagaaacctcagtcctttccccatatatggacacatgtgaaggcatcatctacagcttccagtgctggatctggaatttcccatctcgggaactaggagaaatatgtgtcattaagatgacacaccctttattaggtcactatttccctctgggcatggtaacaccattgtataaagcatgtacacactaagactaacatctcattattgtcaagacaagtgcaaaattttccatattatgaaaacggacataaattagattgtatcaatcttttgtcttctcttttgttcacccaacatagaaagctgtgctatgcaatcaagcaacactggatattttcagagtcagacagctgatgttaaaactgagaaacacaatttaaaatatcttttagaagaaaactgattttatatttatcatcaaactgtgttctaccaaaatctgaaagctatgccggatattataattatagcaaagtgaaatatatatgtacttgaaatatttataacacctcatttttcagttattattaaacttaaattgcactgtagaaatatattattgaagaagctaaattttattaacctcttatgtttatttcttatattacctccaagcaacattaaaaccaaagaaattgcttacaagttccaaacaggcactatctttgttcttcctaaagcctctagagaaccctagaaattctaattagaattagcagttataagctacacattttattattatttcaattttagttaatataaactatcattactttaattcttatatattattattatgtataattactgtacttttaaagtcaaaataacactatcattatagcctgcatggttatgtctcaaaatatcatctaattgactaaaacataactagagaacaaacaatttccaattgttacagatatagtgtatattcagaaagactacagaatcttctgtccttggtgtttgtttataaaaacacacatagacatgtatatacttatattctattaatatagacaacatgttgaactacattttatatcatggcattatgatgtcatatgaaaacataaatctcatgataaggaaaacactggatttgaaaactagaagataccatacacatgagaaaggggctcacactattcgcgagtaccattatatcttacctaggctagcaatatttattcacagttagtgaattagtaaattagatccatcatacaaaccgaaaatattgacttacatgtgcactaaaaatcctaggattagttatcatagtttggtatccaatatggggaccaggggtttggaattcatatttccactgaaaatatcatgcaaggaatgaaaacagctctgacataagaagattattccttgagaaggagaggagcagaggggtgaggaagacatgagcaagcagaaaggttgagtcaggggaataatttaagaaaaacaagaatggagataccataatagagggagccattttagggttacagagaaataagtcactagggaaatatctggagatctacaaagatgacaccagctaacaatctaagcaacaaaggagaggctaccttaaatgccctccctggataatgagagattgatgactgacttatatgccaccggatagccctcatccagcagctggtggaagtagaagcagacacccacaactaatcactgaactgaactggaatccagttgcaaagaagaatgagtgatgagcaaaggggtccagaccaggctggtgatgaagggaccagctccccatttcggcagccatgacagtaactcgtgctctatgatcttgtcttaatcactagaggttaggtgcctgcctcgtgacaaggaaccaatcagaagttagctggtggcactatgctttatgaccctgggtgtactttacggacaaggacaagcacacagcaatggcaaagagcatagcaaccaccctggcagggcctatgtatgggccataacaaccagttgaccaatcaacacagggcaagccctccaattctggaggcacaccaataatgagcctgtgcgtacctctagacactccccttacgctgctcttcaagatctcttgggaggccctaggacttgtgttttgcaagccatctgccatggcgggtgggtgaaagacccgagctaacatggtgttagctcgttaaattacaataaagcagtttgcatcaagctctcgaatctgcctggtgagtggggtgaccgaggttgtggcctgagaccccagatacctgagttttccgggggtctaacagtgaaacccacagaaacaactggcctgaacaagtgggagttcttggtccccagactgataactggaataccagcatgggactgatccagcccccatgaacatgggtttcagtgaggaaacctcggaaatctacgagacctcttgtagtagttcagtacttatccctagcataggtgtggactttgggagcacaatccacatagagggatattccctgagcctaggccctatcccaaaggacatgatagactctgatgacaccctatggcaggcctcaccttccagggggagcagaaaggatatatgataggtaggggtttagttggggggaggttgtagggaaggaggggcaggagagggaactgggattgacatgtataacaatcttgtttctacttcaaatagaaaaaaagaagactattcctctaggaaaaggaatgctatatacatttcatagtttacatttgatcttttctattacttattaacaatgcaaattgggaacatattaggaatttctatcactttggagaaaaattctttatagactatttttttttgtcatttctgtacttcatcagattctcgtaaggtgggcaaatgttcagagctagagacaagctttcccgacagtagctctgttcacctaaagaggaaaagagcaaaccaatgtccttcactgtgaagttctcaccaagtctcctcactccaaagccaacagctgctgcgtgtgctttcagcacagtatgttctgctcttctccccactgttaagttaataggagaccataggcttggagctggctctaagcttccagttcaacctaattgagtacatatactttttgtaacaaccagctgaatttccaccagtcacaaagactcatgttttaatcgcaaaatgatcaaacaaggcaaatgcctaactatagtaagtcccctgatttctatgttattttccatgcttagcataaaaaaacctagctgctcatatgactcccttctgaccctgggtgttacaaaattcatgggtagctctttgtttgctcaaataaattcagttaagtttattctgttccctttccagaaagnnnnnnnnnnnnnnnnnnnnnnnnnnnnnnnnnnnnnnnnnnnnnnnnnnnnnnnnnnnnnnnnnnnnnnnnnnnnnnnnnnnnnnnnnnnnnnnnnnnnnnnnnnnnnnnnnnnnnnnnnnnnnnnnnnnnnnnnnnnnnnnnnnnnnnnnnnnnnnnnnnnnnnnnnnnnnnnnnnnnnnnnnnnnnnnnnnnnnnnnnnnnnnnnnnnnnnnnnnnnnnnnnnnnnnnnnnnnnnnnnnnnnnnnnnnnnnnnnnnnnnnnnnnnnnnnnnnnnnnnnnnnnnnnnnnnnnnnnnnnnnnnnnnnnnnnnnnnnnnnnnnnnnnnnnnnnnnnnnnnnnnnnnnnnnnnnnnnnnnnnnnnnnnnnnnnnnnnnnnnnnnnnnnnnnnnnnnnnnnnnnnnnnnnnnnnnnnnnnnnnnnnnnnnnnnnnnnnnnnnnnnnnnnnnnnnnnnnnnnnnnnnnnnnnnnnnnnnnnnnnnnnnnnnnnnnnnnnnnnnnnnnnnnnnnnnnnnnnnnnnnnnnnnnnnnnnnnnnnnnnnnnnnnnnnnnnnnnnnnnnnnnnnnnnnnnnnnnnnnnnnnnnnnnnnnnnnnnnnnnnnnnnnnnnnnnnnnnnnnnnnnnnnnnnnnnnnnnnnnnnnnnnnnnnnnnnnnnnnnnnnnnnnnnnnnnnnnnnnnnnnnnnnnnnnnnnnnnnnnnnnnnnnnnnnnnnnnnnnnnnnnnnnnnnnnnnnnnnnnnnnnnnnnnnnnnnnnnnnnctttccctattgaaactactgaaacgctcatactctcaactctgggttcttcatttttccaattgtaaattagccatattctatgctccccaagctttttaaaaaatgtctaacatttactatacttagactaaatatggtaatcttccatctttggtcaataaatcaggagttctctggtgtaggaagaaattaatcagttcttccccatgcacatactaggaacttaacgaattagttaagtgaaatgagagacacagccaccccgaaaaatagaagtaaactgctttgtagtggaatcttcaaaataaattttctctaaaatttaagaatcagtaattcacacagaaagtataatttcctggaacttttcacgcattaaatattttcaaatctaaatattataggtattaaaattgggacattttaaagcttcttcctatttagcaattctaagtgtctttaaatttttaaacattcacttgacaacatagactagtaatgctttatagtgcatttagtgataatggagacatgagcctccaacagccttgcagtagggggtagttctcaaaaggttttggaacgctgagtctaacggccttggaaataggtcttagaaacaagagcttggtggctcattccagaatggtgctgattgagctgcaatgagcagcagaatggagaagaaagtagtgccctaaagctatgagagccagggcaggacagcttaagtttgctggagccagaaactcctgctgatttcttcctaagcctgccatctattgaccaaattatgaatcaaagcactgtgagtggcaaagaacttccaagggtacaggaagacaatcaattcttaagagtgttaattaaagcatgtgttgtgtcattaaaatttgtttggtctattgcatgcacatactgaatattctttgatttttaactgatcctggaatgtctcttcagaaataaatcaatgacaccaaagggttccattttactaatatgtacataaatattcaaagttagcaaaatgggggtgatcctgcatagagatttgaaaaatgaaacttgaatggagaggcagcattctatgcagtgagtacgtgatttgaattatttggtttggttttgctcttggtggctaaggctatggcaggaggattaggaatcccctttttgtaactgagtatatctagcaagtacaaaaaggaagaagagatcttctttttcccaacaaacaggtaaagtaattgtcagtaagtaaaacacaacacacacatactcaacatcataggagcaaaagagaaaaacacaaaacacaaaacatttattctctgctagatacaaaacagtgagtatgacagctacattctattcacattatagatgagataattcagttagtggaaatgttatgtactacaattgatgaaagtagatgtgactgttgcacttagaactaccactaataacacactattgtaatgatatttgaatatatttgctatatatatatatgtacatttgatatatatccaaatctcctttatgatttacccttctgtctctattcttactttcttaatttgtgaaatacacaatctaggcttatttaatcagatgtatggactagcctaactctgcaattttataaaatctgtttggtgtaggattcaacacaaacatatcaccaagtaaaacagcaaatgttcaacggagtgagaaaatcagaatgagaataatcacagaaaaaaaagttaaaagctgcctgtgaacagagaagaatccattcaacatcatgtaaaacagaaaaagtaaccaactaaagcatctcatgcttcaaatcttacccctctggagacgaaaaaagaactgccatgttctaagaccatcttgggctacagactagcctaggcctcagagtactttctttctcacctcctgaccaaaggaaaacaaatgtattcctaaacatttaatacttttacctataatatgggcaaaagttgtagagaaaaagacacagattgagtatccaattatccaaaatacttaatatcaaaagtgtttcagctttgttataagattgtagaatatttacatggatgaaataaaacatcttgaggaaaggacacaagtctaaacaagaaatttgctgacgttccatatatacacagtctgaagataatactatccaatgcttataactgcatctctgtttgttttaattaggaaatattccttgtgtatattactgagtttcacaagcctatttttatacaattatatagcacacattggccatttccctgcccatatctgtcttttccccctttttctttttctctttcttctacactcttggtggtcctcctatgattccacaacaaccaaactcatggcattagatacggaatttctttcttgtatactattgtataatactggtggtcaacttttctgattctgtaacaccaatgacttagattagagatgttcaacatgaattcatatgtactcttggcaacactttaaactgataaatactggaaggcacaattgtaatataattcaaattattaaatgaagaatacacttgtagaatttatgctacagcccatcccacaaaaaaggacatacagaatcatatatgccacttaattttagtagcagtaaaacaaagtgtctgaagccaggggaatggttaaatgtactaacacagaaacacaaacacataattatataaacatgtaaaaagaacaaaattggtaaatatagaaaaataccaatgtaaattacagatgggaaggaaaaacaatggaaaatgtttttaaatgtttcctgacacatactatagatcgtaatgtaaaaaatgggtaataatggttttctttccagaaagtctgagtctagaattgaagagcaaatttctcctttctgtcatcatcttacgtagaacaaacaaactacatgggtactttgttataagcataaatatttagtactaaaatataattatgatagtgatacgtcaaatcattggaaaaattttaaacatgaagacaactataacaaatacgaaaaacatgaaaactactaacgctttttttcaatgcaaaagttcttcagtacactctaatcaccacagatctccccctcttcatctctctcctcctccattctatctctccaaactgacaaacaaatcagacatatggcaaaagcactcattttgaagacaggatagcatgcttccatttattagttgtaaagacttatgtacaaaacttaatgcctacatttaattgaactactaaaaggttcaaataaattatgaagaccccattgaccacaatgactaattgtgagacctacatattacgtgaatggcatgtaggaaacacttgaaacgttaagggtataatcataaaaagatatgcctttttcaaatccacaagaatattttgtgaggataagatttggatattaactcacaacatatgctcataacaaaaactatgagatttcctgggaaataaggttgacaaatgatgtatatttaagaagtgagacagtgtaagccctatggtaccagtcttcctcaaatatcaaccataaatttcagagtcattagtattccatgatgcaattattgtgatgcatggtaaatcaaaaaattaatatcctattacttagcaaaatagcagttatatgaggaacagcacacatattaaataataaagtctataccttaaataataatatctaggcaaaacaaatttggctaaagagtaaaacatagctagtacatgaatttatgtctgatcccacttattgtgaatagcaatacatacatatatatgtagaatgctttggcagaaatatgaattccaggacatgaggcacaggaattaataatgtgtaaaaataaaaggtacctttcttctgggaagcaaatgtcaaggccagttttgcaaagagatctggagtctcaaacttgtcttcttttacttttagccagaaacagttttccgataattctctaggctcaatctaaaacaaaataacaatgataagttttagtgttgttacttactgtttaatttttcaaagactgtctttcctttgttcatctatgcactataacaatttcaaatatataaaattacactcataaatattcagaggaacacttacaattctgtcattatacagaaatgctacacaaaagtaatgggtcataaactaaaatacatttgaaagcacctactgaaaagaccctcaaaataatatagtatattcctcttctacttgcatacattatccttgttccgagattttttttttaatttttgatgttccaattattatattttactgtgaaattttaatacatgtacaatatgtaaattgctttcccttccctaaaccatcttgtcctcccatttgtttgggccctccctccatgcaatttaatttaaatgtttaaaatgaaaacacttactactatctaaggcccaaaaacaccaaagacaataggatcttaacaagaaataatattaagaatgtgacaatacttagcatttacaattatgaaattatttgaatcatccagttcatggattttgcaatttgattttcctttgtctttaccatcattttgacgttttgagtaagctacctgtgatctaggacacacatttaaagatgaacatagggtgcttaacacagaaaggaaagcaataatggcagtaatcacaatgttaaactcacagcaatgcatttctcacacattgtcagtcccagtagaagcaaaaaaggtccctagagttagacttacaatcttaccttggaccagttgattcttttcatggatacttctggcttatatagttttttctgcttcattccaaatggtagctcaattggtactgatgggggaaggtgaaatcctccagggggtggtactggaggagggcctccaaacaggggtgatggtagtggtggtgcaataccaagaattccaggtaacggtggcggaggaggaggaggaggtactcctggaagtggaggaggtggtggtggtggaggaggaggaggaggaggtggtgggcatggcccaacagatgacagtggagttgctggagatggtgcatgtaggcctgaaactgcagatggatctccctgaaacacaaacaagtttaaatgtttccagaaatgtataacacaaagtatgcacatctgttaggagttaggatttaagactttatatacctttctaaactttcaagattatacattttatcagtataaataaagactttttggtatacacagtttagtcctgcagacaatgactatttctgctaacattaataaaaggaaaatttgcagtttgtaagatttttatgaaaagctcttatagaatgaaacactacctttcactataaacatagccaaagaaatatgaaatatggcttaaaactgttaacctagcttattaaaatttgattaaagtatgacaaggtcatggattcaaatcccttgggtgtcaattagtctaatagagagtatttcacagtaccaataatttagctgtctccacataaaagtgactaatactaagtagaatccatttgcatagtaatataagcatatcaacattttacattattggttccatttgtgtttattataaccttgtaacatagataggacatttaatctttatctcaatgcttatagatgaggaaactaaacgcaaaaacattaccttaacactgagtatataagtcatttactggtgtgcttgccttacatacaggaaaccccaagtttgaacctagatactatgaaaagatgtctgtaatgactaatcaataaagcacagtggaaaacatgaggatctacatttgaatgtgattcttctctttcacttctgctctcttcatgaaagagtttcatttgtcacagaaattcactcatacacagagttcatgagaagaaaatacctcggttctaatgtcaaaaactaacttcaacattgttctccactggcagttaattacagatgaataacttaagaattttaacttaagtaaatatatactctagaagattgaagcctctcagcaccaaatcatgtttatcctcattgaataattaaaatttaaataataaaactgagatataatatagcagtgtagttgatactgcttgctaggtcacgctggcccaacctggaatatatagaaaatttcagactatcctgggtcatgttgtgagagtgtaccaaaaaaaaaatagagagagagagagaacaaaaaggaaagaagggggctcaccatcatctgtgagtagataagtataagcaagagatggcttttctaacatacacaaaacaaacataaaaggtactgcagatagccaggcatggtggaatgcatctttaattccagcacttggaaggcagatgtagagggttttctgtgagttcaagacaatcctggactgcacagagaaccaggctctccagggctacaaaatgagaacctgtctgaaaagtaaacttgaaaacaacaaaaggtacttgatgggggaggtccttctgtgtatatgtttctcttattggttgataaataaagtgcttttggtcaataggaaagcaagacaggtgggactaagagtcaaggaggattatggaaaatgtagtaaagagatccagacaggaagtaacatagcaggcagactcagaatataagcagggagaagaaggaaatcgtccacttgctcttcctcttccatctgctctcttctatatggagccaccatgtgatcctggaaagatgacttctgctgatgtcctcaataagataaatcttatctcatgggatcagaactccaccagcaggctccagcacacccagagactgacaaagccctggtaacagttccgcttccatccaatggcccaggtaggacaggggctgcttccggttccggttcccctgccctgctcgggaatacctgacacctgggggaagtgcacgggattcgaactaacacaaaatatccgggaaatattggacaccatgaaaagaccaaacctaagaataataggtatagaagaaggtaaagaaatccaactcaaaggctaagaaaacatattcaacaaaatcatagaagaaaactttcccaacctaaagaagcatgccaatggaagtacaagaagcctacagacaccaaatagactcgaccaaaaaaaaaaaaaaaaaaaaaaaacccccccccccaaaaaaaaaaaaaaaaaaaaaaatacctcctcgccacataataatcaaaatcccaaacatacagaatgaagagaaattattaagagcagcaaaggaaaacggtcaagtaacatataaaggcaaacctatcagaattacacctacattttccatagaatctctgaaagccaaaaggtcctggatagatattctacctacactaagagacaatggatgccagcggagactactatacccagcaaagctttcaataaatataaatggagaaaacaagatattccatgacaaaaccagattcaaacaatatatatcaaccaatccagccccacacaaagttctggaaggaaaactgcaactcaaggaagttaactacaaccaaaaaaatataggcgatagacaatcccactttaccaacagagaaaagaaaaaaggaatggaaagccacacgtaatttcaccacgaccaccaaatccaaaacaaacaagaatgatcaatcaatggtcattaaaatccctcaaaattaattgtcttaactcacccataaaaagacacatgttagcagaatggataagaagaaagaatccaagcttctgcagcataaaagaaacacacctcaacttcaaagacatacagtacctaagaattaaaggttgggaaaagattttccaattaaatggacccaagaaaaaagcagaagtaccaatcctaatatccaacaaattggacttttaactaaaatcactcaaaagagatgaataaggtcacttacaactcatcacaggagaaatccatcaggatgaagtcttatttctgaacatttatgccccaaataaaaaggcatccccatttataaagaaacattgctaaaactcaaatcacacataaaaccgcacacacttatagtgggagacttcaacaccccacactcaccactggacagaaacaccagacagaagcttaacaaagaaacaaaggaactaatagaagttatggcccaattgggcttaacagacaaatatagaacattccatccaaataaaaaacaaaatacattcttctcagcaccacatggaaccttctctaaaatagaccacatactttgcaacatactaaacctcaacaggaactaaaaaattaaaataaccacctgtatcttatcagaaaaccatgctttaaagttagaattcaacaacagcatgatttgcagaaaaccaacaaacaaatggaaattcagtaacgcccaattgcacaattcctgggcccaggaagaaatttaaaaaatatgaaattaaacatttcctagaatttaatgagaaagtggacacaacatccccaaacttatgggacactttgaaagcagagttaagaggaaaattcatagcactaaatgcccacatgaagaaacaggagaataatcacactagagaattaacagcacaactgaaagctctagaacacaaagaagtcaatacactccggaggactaaacaccaggaaataatccaattgagggctgaaatcaataaagtggaaactaggagaataatacaaagaatcaatgaaacaaagagctgattcttttagaagattaacaagacagaaaaacctttatccaaacttaccaaaagaaagagggtgaacatacaaattaataaaatcaggaatgaaaagaaggacataacaacagacacagaggaaattcagagaatcatcaagtaatacttcgaaaacctgtattcctcaaaattcgaaaatatatagcaaatgaaaaattttctggacagatttcacttaccaaattaaatccagaacagataagcatcttaaaaagacctataaccaataatgtaatagaagcagtcatcaaaagcctcccaacaacaacaacaaaaaaaaaaaccccaggaccagatggattcagtgcagaattctaccagaaatacaagaaacagaaaataccaattctcctcaaagtattccacacaagagaagcagaagtgtcattgccaaactctttttaccaggcttcaataaccttgatacccaagccacacaaagacacaactaagaaagagaactacagaccaatatccctcatgaacattgaagcaaaaatgctcaataaaatactggcaaatcgattaaaagaacatatcagagaaaccatccaccatgagcaagtaggcttcatccaagggatgcaaggatggttcaacataagaaaatccatcaatgtaatccaccatatgaacaaactgaaaaagaaaaaccacatgatcatctcgctagaagctgcaaagcctttgacaaaatccaacatcccttcaccataaaattcttggagacaacaggaataacaggaacataactaaacatgataaaagcaatctacagcaagtcaaaagccaacatcaaattaaatggaatgaaactcaatgcaattcctctaaaatcggggtcaagacaaggctgtccactctctccacacctcttcaatattgtccttgaagttctagttagaggaataagacaacaaaaggagatcaggggatacaaatcagaaaggaagaagtcaaattttcactatttggagaagatatgatagtctacataagtgacctgaaaaactctaccatggaactcctaccgctgataaacacattcagtaaagtggcaggatacaagattaactcaaaaaaaatctgtagatgacacattcatggagaaagaaatcacagaaacatcactctttacaattgccacaaacaacataaaataccttgggctaacgctagccaaaaaagtgaaagacctgtaccataagaattgtgagtcattaaagaaagaaattaaagaagatgctagaaaatggaaggatccccccaagttcttggataggtaggatcggcagagtaaaaaacggcaatctgccaaaagcaatctacagattaaatgcagtcacaatcaaaatcacaacacaatttttcacagaccctgaaagaacagttatcaactttatatggaaaaacaacagatgaggatagccaaaacaacaatgtacaataaaggaacttctagaagcatcatcatccctaacttcaagctctatttcagagatataatcctggaaacagcttggtattggcaaaaaatagacaggtagaccaatggaatagagttgaaaaccctgatactaacccacacacctacaaacacttgatttttacaaagaaactaaatttataggatggaataaggaaagcatcttcaacaaatggagctggcataactggatgctggaatgtagaagactgcagatagatctatgtctatcgccatgcacaaaacttaagtccaaatggatcaaaaacctcagcaaaagtccagccacactgaacctattagaagacaaagtggaaaataccctagaatttattggtacaggagactgcatcctgaacattacacaggtagcacagacactgagaccaataattgataaatgggacctcctgaaactgagaagcttctgtaaggttaaggacacagacagtaagacaaaacagcagcccacagactgggaaaagatattcaccaacccacatctgacagacggctgaactccaaaatataaaatgaactcaagaagctagtctccaagacaccaaataatccaattaaaaagtggggtaaagaactaaatagacaattctcaatacaacaatctaaaatggctgaaaggcacataagaaagtgttcaatgtccttagccatcagggaaatgcaaatcaaaacaactctgagataccatcttactcctgttagaatggccaaaatcaaaaacaccaatgacagtttatgcacgagaagatgtggagaatgggtaaactactcaactgctggtgggagtgccaacttgtacagccactttggaaatcagtatggcgactcctcagtctaccacaagatccagcaatcgcactcttaggcatatagccaaaagaaacacattcatacaacaaggacatctgttcaacaatgttcatagcagcattatttgtaatagctacaacctggtagcaacctagatgtccctcacctgaagaacggatagagaaaatatggtacatttacacaatggagtactactcagcagtaaaaagcaatggaatcttgaaatttgcaggaaaatggatagaactagaagaatccattttgagcaaggtaacccaaacacagaaagacaaacatgttatgtactgactcatatgtgtgttttagacatagagtaaagggttaccagcctacaattcatactgccagaggagctagtaaaaaaggaaaaccctaagagagacatatatggtcctccagagaaggggaaaggggcaagatctcctgagcaaattgggagcaagggaggaggggggagctatgagaatgagaagggggaagaagagggatgaggaggacatgatggagcaaaaaggttgactcattggaagaatagaagaaaacaagaaaggagataccataatagagggagaaattttaggtttacagagaattcaggcacaagagaaaggtctggagatccacaaagatgacaccagctaacaatctaagcaacagaggagaggctaccttaaatgccctcccctgataatgagattgatgactgacttatatgccatcctatagccttcatccagaagctggtggaagtagaagcagacacctacaactagtcactgaactgaactggaatccagttgcatagaaggatgagtgatgagcaagtggtccagaccaggctggtgaaacccacagaaacagctgacctgaacaatggggaactcttggtccccagactgatagataggaaaccagcatgggactgatccagaccccaggaatgtgggtttcagtgaagagacctcagaaatatatgggacctcctgtagtatttcagtacttacccctagcacaggtgtggacattgggagcccaatccacatagaaggatactccatgaaccaagacacacgggggtggtcctaggccctagcccaaaggatatgacagactttgatgagccctatggggctcacccttcttggggagcagaaagtatatgtgatagataggggttttgttgggggggcggtagaggaggaggagagggagagggaactgggattgacatgttaaaccatcttgtttctaattcacataaaaaagaaaccaatttgccagcagcattttaaactattataagactctgtgtgatattctgcgtgtacatgtggctgtggggcttgggtagatggagtaaaggcttatcattacaggtactgtggtcaaatgtgtcagggaagggcatgagttaagagaggtgtcttcaatgtatggtatctcaccatatttaatatgttaacaagtgtttcaaatctctgagtattttatgtttatccaatttagtggcctatggaatattttctttgtgcaaaatcattaaatatctctaagtaatgtgttttaatgttggcagaatgaaaaggattggccaatatgttacagatctcatgaaaggaagggaaattgaacagcaatagaggttgttgtaactaggtgaatagtccgagtctatgctgcaaagggagttaagtataagacatcccatgtcagaagggtttagatatttgtggtagagattttctttaatcccatatacaacaggcaagcagtgtataaaataaatcctccagttataacaattaagacaatgttttgtggggattaattgacataaaagtatgaacttgaagaggaaaagactatagacaataagaaaattaggatacaactattatagttcaatcaaggtgtaatgagagtggacctgaagggattggggtcctgatgaaaaggtgaaaaaagtcactggaataatttaaataaaataactaatttcatttgtcaagagcagggcaagaaacaaatcaaacttcagccttaaaaaaagtgaccaattttaaaacaagtcgaaatggagactaaggtagcttaaggaaactgaaaagatcaaaaatattgaattttagttcaatacaaaagacatgcctatgaggacagctggaaatgcaagatagactcaaatgtcttgacatacaataaaagatgatatatgagcatatgaaactgagttggacatttgtgcaaggaagtacaaagcagagaaaaatgccaagggcagagagaaaacagatacctcacaatcagagaatgagaaaaggagagaaacaaagttctcagacacacagaaagggaagtagaataaaactgacaggagaaacaaagacttaaatagtagatatgaatgatactggctatgggtatcagaaagctaccaccataaatactttgcagcttaccagtgacttaggaagtaatttctcggtatattttttgggacacacatagtgaatcatgtacctactggacattatctatttaaaggtagtctcttcaaattcatattattcttttaagccacaaaatgtgtagagattacacttaattttaaagtttagacatcttactaagtgtttttctgtgcaggggaatttaggtagaaataacgtgtatagactttgaatggaagatagtctagatataagatctcaagaagtcttttggttaattaaaattcatgagcatttctatattctttttgaaagaaaatactatgcactcaatttttcaaatcatcatgaaaatttcatgtcataaacagtttggcttggataatgtattctgctaaaattattcagtgcagttcgagcaaatgaaacctctatttatttccaaaccttaaaatgatttactaatggaaaaataaaatctgtacccttttcaactaatatgtgaaactgtcaacaacaaccaaaaagtctgtgatcacagttttcccactgactaacaagatagttttctagccacaaattcactgtgaccaaagtctacactttcttccattacctgtagtctaagttgctggatttctgtttccagttctttgattttttcgtctcttttctgaagctctgcttgagcttcctgtcgagctgtgaattcttcatcaaactgcaatgaccatgattagaaatgtacggttattgatacttattggggtaagatttaaaggacattatatagtaattatgtagcatgggttttgctatgctgcattcacagatcactctgagagataaaggtctttctctgaaaaactaagaagccacttgcagaaattttactttttagaaaaactgggggaaaaaaaggggtggataatgaagcgtctgttcacatgtaatggaaagtttattatagaaaattcaattgtggaattaatattgtttattaataatttgcccatatttaatgcattttcaatttcttaagcatatttaatcttaaaaacaatcgcatttttgaaatgatcggatgtatgtacattaacacaaaatggactgggagattattgttgccataaacctcattgcttagcatccaaaaagaggtgcttcataaaatctgactgcacaatgatatacactgaaattctactctctatcagatggtttaaaaaagtcctctctaaacaattcaagaaaggaaaatgagggaagaaaatatggttccaagggcagaggtgcttgtgccaaggcataacaacctgagtttgatccttgaaccccataagatggcaggataaaactgcatcctttgacctcgccacatgggcagacacacaatagtagtatgtggacacatgcacaagcatgtgtgcatatgtggatggaccagaataaatcagtaattgcataatacatccaagaaaaaagaagacaaaaggtgtgaaaagtaaaaatatggggtactaaagataccaactctccaaaaggtggaagtacacttcctgcatcatgtcctagctcttacctcagtcattaccctaaacagatgtaagttgagcaacatatttacaaaaattctgtacaggtctcactacagaatgctactttttattgtcgatgtcaactcaaataattttatgtctgtagataatcccaacaaaattatttgtttctaaaattgataaatcttaccatccaagactgtcatttaaagagtatgaaatatagagcaacacattctctgttagtaaatattcatccccctactaaacatgagctttggatattagagaatgctaaggtaagtcataaagttaaagaatgagcaatatgtaagagctgtgtcttgttgtcagatggctgaacactggggatcttttttgcatttgtttcaatattctctgaagccaaaaagagaaagatactctagtaattattaacagggggagctaggaagaaggacagagagtaaagagggaagagagagaggaaaacttgaaaacttgattaaacagttataaaattgtatataggatttcatcaaataagaaaaggtatattcccactcttaggaatatacccaaaagaagcacattcatacaacactgacatctgttcaacgatgttcatagcagcactatttctaatagccagaacctggaagaaacatagatgcccctcaactgaagaatggatagagaaaatgtggtacatttacacatttacactaaacagcacaaaaaacaaaggaatcttgaaatttgcaggaaaatggatggaactagaagaaaccattctgagacaggtaacccaatcgcaaaaaaggcaaacatggtatgtactcagtcatatgtggattttagacataaagtaaaggattaacaacctacaatctatacagccagctagtaaacaaagagaatcctaagagagacatacatggtcctctggagaaggggaaaggggcaagatctgctgaacagatttggagcaagggagtaggggggagggaggtaggtgaatgagatggggagaagaggaggggtgaggaggacatgagggagcaaaaagattgagtcggtggaagaatagaagaaaacaagaaaggagatgccataacagagggagatattttaggtttacagagaaatcaggcactagggaaatgtctggagatctaaaaagatgataccagctaaacatctaaccatagaggagaggctaccttaaatgccctcccctgataatgagattgatgactgacttatatgccatcctatagccttcatccatcagctggtggaagtagaagcagacacccaaactagtcactgaactgaactggaatccagtttcagagaaggaaacccacagaaacagctgacctgaacaatggggagctcttggtccccagactgatagctgggataccagcatgggactgatccggaccccaggaacaggggtttcagtgaggagaccttggaaatctacaggacctcctgcagtagttcagtaattatcccgaataggtgtggactttgggagcacaatccacatacagcgattctccctgagccaagacacatgggggtgggcctaggccctatcctgaaggatatgatagactgttctgaccccgtatggaaggcctcaccctccctgggaggtagaaacgatatgtgataggtaaggttttagtggggggggggactggaagggggggggggaagggggaagaaaacaggattgacatgtaaaacaatcttgtttctaattcaaataaaaaaaggaaaggtataaaaacatataggaaactgagtcaaccaacaaagtcaatttcataatgctaacagaaaaatcaataagtaaaagaataacctcacagaaaagaaattatgtgtgtatcatcaacatatatagccactctcagctgaacatttaaaattattttaatattcttaaattaaatattaaaaataatgttattaaatggaaaaatagaaaagatattttattgagtatttttgcatcaatattcatgagggatactggtgtttagttctctttcttacttgtgtctttccgtggcttgggtatcaaggttattgaatcctcataaaaagagtttggcagtgacacttctgcttctattgtgtggaatactttgagaattggtattaactattccttgaatttctggtagaattctgcactgaaatcatctggccctgggctttttctttttttctttttttttggttggagactttttttctttgacatatttttatttcctttttatttaatttttacaaaattataatttcacatgtcaatcctttctccttttccccctgcccccccaaccagcctcctttccctccccacctctgctccccatggagggtaaggcccttgacaggggctccccaaattccacaacatcatcctgggccaggcctaggctctctggttaggagaattttgatgactgcttctatttcattattggttataggtctattcaagttgcttacctgttgttgatttcattttggtaagtgaaatctatccagaaaattgtccatttcctttacgttttcgaattttgagaaaatgtggtacatctacacaatggagtactactcagcagaaaaaaaacaaaggaatcttgaaatttgcaggaaaatggatggaactagaagaaaccattctgagcaaggtaatccaatcccaaaaaggcaaacatggtatgtactcactcatatatggattttagacttagagtaaaggattaccagcctactattcacactgccagagaagctagtaaacaaggaggacccaagagagaaatacaaggtcccctggagaaggggaaagggacaagatctcctgagcaaattgggagcaagggaggagagaggagggagctaggagaatgagaaggggagaagaagagggaagaggaggacataatggagcaaaaaggttgagtcaggggaagaatagaagaaaacaagaaaggagttgccataatagagggagaaattttaggtttacagagaattcaggcactagggaaatgtctgtagacctacaaagatgacactaactaacaatgtaagcaaaagaggagaggctaccttaaatgccctcccctgatgatgagattgatgactgatttctatgtcacccgataaccctcatccagcagcctgtggaagtagaagcagacagacacccacacataattactgaactgaactggaatccagtagcagagaagaacgagtgatgagcaaaggggtccagtccaggctggtgaaacccacagaaacagttgacctgaacaatggggaactcttggttcccagactgatagctgggatatcaacatgggactgatccagaccccaggaacgtgggtttcagtgaggaaacctcggaaatctacaggacttcctgtagtagttcagtacttattcctagcataggtgtggactttgggagctcattccacatagaggaataccccctgagccaagacacacgggagtgggcctaggccctatcccaaaggatatgataggctctgatgaccccctatggaaggcctcaccctccctggggaacagaaaggatatgtgataggtagggttttagttgcaggggtggtggtggatgaggagtagagggggtgggaactgggattgacatgtaaaaccatcttatatttaattcaaataaaaaataaggggaaatgggcaaaaatttaatgaaaacaaaacaacaacaacaaagaaaaaataagacaaggttgagcttatatctaaatgaaattataatgtaaagactatactcattcaattcacttataaacacagaacaaaggaagaatttaaagttcaaacaagcctacccagagtaacaacatcatataatgaatgaattagaaaattccaagtagtctaaagaaaaagaaatgaggagacaagaaaagagaatagattccaactttagactgctatcaataccaaaacccgttttattttcaggaccaaagccagggccttattcatgatagaaaaacattctaaccaccaaacttcatcaccagttcaaaagacagagttttaaagggaaactaaaactctcccagttccctatggagttgtgtggtataagtgaatgctaaagaaaagaaatggaggaaattttttcggtggtttgattgtaactatgtattatttcaggtagctaattttattttatttatcattaagtacaaggctagtttttttcttacctaatgaattaagttgatgggagagaaggaaatagtaacaatcataccttaataggaaataaatcaacattgtataatgtttgcttttagtagtacaatgtactacaaaaatgaaaggacaagttataaagtgtcatacaaaatcaaatgttattaagggtacatacttacatactgggggttgaactattaatttaaaatgcaggactattattttggcatttaccttctttgaaaattccattgctttttgctcactttcttcaacttttgccttgtttacacaagcatctattcagatgaagcaaaaatgattagaaatatttgagatgaaatatctagctaattatggctgaaagtatataattctgaaattctcacatgaattatcattaaaagaaaattaatctacattataatatacaaataataccacattttctttctttagtattaaagcaaaaacttcaggcattaataaatatcttagatgaaattgtccctgaaattaaaggcgttaattataattcaacttttaccactatagaattcattggaaaatcacacattattatatagagactggaggcaaaaactccattttcaagataatgaaaactcaaaatgatcctctaaaacgctggggaggatgacgcagtggcattcttcagttcaggttttcagggaaaatcttttacttgacttctgtatgttgtaaaatggaagcaaacataaaattattcaggcctagttaataaacataatgcaaaaacctctttaatcttagattatatccatgtgcattaccccaatacttctccaaaggaaaatgaaacatatgtctgaattgcacatttatataaatgaaccataacagctttattacaatagttgaacactggaaagaacaaaactgtccaccaagaaatgcacattgtttaatattcatacataaatactacttcacaatatacaggaacaaactatcaatagatgaactataacatggatgaatctcaaacatatgatgcttgatgaaacaagatagtcacagagagtattgctacatgacactagttgcataagattttagtaaagaaaactggtgagagaaaattaagctaaaataaagtcagtataagagagattagtaggtatttctattttcaatgacacttttagtgacatacccagtgtatgagtagagtagggaaaaacaaggagagaagacagcaaatttttaaggaattaatacagcttatgatcttaaatacaatgatggttttaagtacacaatgcattaatatatgtatacatttattaatttatattgtaaagtgtaaaaaatgtacttaaaatatatttattagctatatatatattgattagcttatatattaaaatataagtaattttctccactcaaatgtataagaaagatttttatcaatttttattgattgttttatattattttatatgtatggatctttttcctgaatatatgtctgttcaccacatgtttgcagtgcccacaaagtccagaagaggacataggatcaagcagagtacagatggttctgaggtgtcatgtaggtgatgggtgtccagccaaggtccactgcaagaccaggaagtattcttaactcctaagccctctctctggctacaagtatttaatgtgtttcatgttgtaaaaatgttagaatgttccatacaatcaggaaagttgtattgtccaaaggggctttatatgggcaatataagtcatagctgacaatgatttttactttgatttctatctaagttccaatggaagccattgaacagttttagaaaaggatctgctatgatttaagaaaaaacatttgatgtacagaaatgtgaaatcggcccagactggaatactcaggtccaagtgatattcatatagagacccctgcatcttatggaggagggtgaagcccttgataactttgtgtatatgtgtatttgcatgtggatattctaatgaaagttccacaataatcatcaacttttcaaaaacaactagaagaggttgtagctcacatagttaaaggttcaagatttctaaaaatatttggcatttgaaattcctatcttcactgataacaattaactgtgaaaaagcagtgagaaaatgtccagcatttacatgtgagaatgttcaattaagctgagtattaaaatacatttttggtgacagagatcaattagcagattcttttacaatcttgaggatgagaaaacaatctagatgcaataataacagaaaacaataactgaacagtatttcaaataatcatgatagatcataacatgacatgtagttagcagatccaatttgaatgcaaacatagtcaaaccttcacagtgctcattgaaaattcagcttagaagtagttacattcaaaggcagacatgtgcataaagaaagggctatttaaaatgtattcatttaaaaggtagtgatcttgatcagttgatatttgtcatttacagaaatctctaaattgcctatagtaagaaacaaaaaattatttatgagaaataatgttaaatctctgactcctttgtgagtctgtcctctgcaatgtagtgaaaaatattatataaatggtattcaacaaccttttattcattaaaaacaagcaacttcatgcttcatcctagtcaatgatagttttaaccatctataaatacaattacctactacagagccatagagcataacatatagcaaaagagaagcttgtcatcactgatcagactgttacaacaatgtttctacatggcattcttacttgagctattttctttttcatgacatttcttttctcaaatttgagagccagtagtaacatgtctataatactgagactctcctgcacatataacttccccaatctttctgtgaggatgaactgaactaaaagatactaaagtcatgcttttaaacagcaaggcatgcacctatttaaaaaaaaaatcatggatttttgtgacacatgacaactaattgtcaactgactatgtggtagtgaaatttatcaaaaagattaatatatctgaacctataaagagaattcttatgattctcaaaacaaatagttgtattagttgagcatccataacaacaaacatttaccagattttaagagagttcagtgagagacctaccctttcaatgtgctcagtatacagaaggtgtgacccatgaatggcagtatagagtataatccatacctattaggtgagtgagatcaatgtctaatctctgcctgtacttgaagtccgggtccatgccactgcagtgcagcactatctgggaaacacactcctcaattattttataatactgtggcctaaaaggaggagagaaaatatttgagaatacttttctacttgtatcaatcaattttcttatgaagggatagagaatgctaaaagaacttagtttttctccagcaccaataagaaaataattccactaacatttgcacttccttagagaaaatatgattaaggcttaaagatggtctgaacattagggagccaaattgagtgtgatgtgatcgactgaaaatatgtactgacttaatatgctagtttgcagggactcatgcttgtgttcaaaaatacttatcaaccccatctatttatttaaggtattgtttctaaagttaatgaaaatgaataaccccctagtcctatatctatgagcacagaaatagctctagacagccacaagcactcattttcaaaaaaagatgagattcttggcattaggtggcaagcaatgtcttgaattcagtgaagaacatttactcaggacagtaacaccagtttataaaactggactgaggcatttctgttacacagtaatgcaaaaacctatgtatacaacatgcttcaaaaaacatctattttatgaagccatatacacttaataggcacagctatagcagtaatttgtgtgatttatcaaacgttttaaaaacacatcacacttccgtaatctcccaaggtaattctggccttaataatgattgctgactggaaaaggaaaaataaaagacattttgcttttaaattttgtgggagacaaattttcattggttaataaattcaacactattgtagaaaagtattaattcagacaaactacaatataaacaccactaaccatagcttgtcaacctactaaaaactctaaaccaatgaaaaagagattctaattacccttctgtgtatttaatcatgtggttgttcctaagactaagaataaaaagaaatacgtattgcatggctagggatttgaaaatcaccatcagatctggagatgaatagtattagtccttaacctcagtgtgatgagcactctttggataactaagaaaaacacaactcttctctttgagggggattttattaagtctacatatggaatgaaagcacatgttacacattnnnnnnnnnnnnnnnnnnnnnnnnnnnnnnnnnnnnnnnnnnnnnnnnntgtatgggctgaggagatagctcagtggatagaagcactagctgtgcaagtaggagggcctgagttcaaatgcctagaacctaagtaaaaaggcaggcatggatatgcacatctgtaactgtctggggtgttgctagaaggaccaaaggaatctgacagtagtcctccagtttcagtgagaaagacactgtctcaagataaattgaaagaaagtaacagagcacaacaaccaatttgacctctggcctctgtctgtggtcacggaaacaaaattacacaaatactgtatacatacatacatacaaacatagtacatacatacatacatacacacacacacacacacacacacacacacacacacacacagagagagagagagagagagagagagaacatactcatataacacaaaatttttaaggatgccatgtgtaaatgttttatcatttattagtatttattgagaataggtacttctggcaaatcttgttcctaggtaactgaataatcatgaatacataataaatacataataaaattatgtattttaatttatagtggtttttaaaaagcatgcattagtagtttcaacatgtttctgtctcctaaacatcatgatgtgatccaatcactgcagtagaatgaagaaaaaaatagctctatatgctattttagaattatcaatttttgttaacaatacaactagcattctaatatcacttctttttctattattcaagcaaattttgagaatccaaagaaactagtatgtaataattgcaaacatagaagagtgtaaagcaagtaagaggaccttgaactgtcattaacataagaccatggtcatgagcctataatttcagtcacccataagcctcttgctatatatgcttccagtttttagatatagaccttatcatctattctaaagtataactctatatgttatcatattttacaaaaagtaaaatatacacaatacttttctgaatttgaagatcacacatttactaaacactataaaaagaaatgataaaactttacttgttaaaataggaggatttaagacattctagcagtatcaagcagaaaaatttattacatattcaataatatacgacaggttaatttatacttacattctggttgcatgcacaccatagttatatgcagttatctttcctggcccaattaaaataaatgaattctttttttcaaatgttgcctcaagtagtaaaacacttatattttatgtacatataacatatatatttcctcagccctactaccttgttaacttccttttaatatccaattcaaattatacatgtagtcatctcacatatgaaccttacctgatataataatcatttctgatgagtagaaagtgctgcagaatggataataagtaactttcagctgcagtgtctttcagcatgttatagagaagatggtagacttcattcatatcggtagaaagaaagtaaaggaaaacatcaaagattcttaatggacagtgcatttatgactaaagcagcctaatttttaaattaaaaatttactacttagtttccattatggttaataaggtttcaatttcatgatacagcatttaaacatctacagaaaaaataataatcatccattatattatcaacttcaaataatagttaggaccattcaaatagcaaagctattggtgaaggaggctttgtcttgatctctctatgggtccaaaagagccagggctattctatttttatcctcagataaaagatatatcaagcaagtattcagctatcaaaagatcacaaacctagctttattttaaatacccaaataaaaagtctaaaatctgttgtgttcatacttgaccttctgaaaagtccatggacattaggacatttttttttctttgggatataaaaactagtggtgtagatgctggtagtagtctagaaaaaaacttcaagattggactcacattatatgtactgagtatattgaaagtccacataaaataaaggtaaaagacaagatgcaatccaacatcttgaaacaccatgaaatgggcagtagaattaaatatacaatgcactaatttaaacaccacatcagagttctgagttaaagtaacataaggacattgaatggctacaaaattatcaaataattgattatatcactaaatataaagcagtttattgattaaaaactgtttttattaattttgaattactttaatttttaattatttcctatgataataacatttctatacattgtatctacatttatgcaatattttcatgtaaagagaggagaagagtacataaaaacacataagtcaaataaagtaataagggagtttcaaatagggaaatattgttcaagtttgtttagaataccgaaagaagaaagataagaaaatattaaaggtagaaaagcacagctcagaggttactttggttcgcaagtgtcttcctacttcatagaatccaaaagtataaattttaatgggagggagataagttgcagaactgtgacaatcatatcttatgtctcaatttcacatcagacagttggcacaggaagattatatgctgttatatatgatgtaggtacttttatagcactactttcttatagaaagctcctattgtatctaacaattttgctatcattaaggaacacaaatacccgataagaaataagatactcatttccagaaaattgtatctataagtggagtagcatttaataaaaacaaaatatctcttaactggtatcacatatgaactcaaagaactttttctcattcttggaaatatatactgcttaaggctcttaggctcttgtttattcaagaccactgagcagagtgtatctctaatacactgagtaattaattgtgtggctttcaatagtctgaatacatcatcaaagcaaagtagcaattgtcagcacaaatgggtatcaaggatagcatcatggtggagcactaatataaataagcagttacaacattgttcatagaaaaaaaaactaatgaaatataaaaaatatcctcaagtcctgcttttaaacattaagtgtaaaaattaggtatttattttgtttgttaaaggatattccatttcagctcgaatgtcattgagacggtgggataattcagttagatcatcttctttgttctcttcaaacactttcagctgaatatcaagctcatcattctctttttctttaagaccctaatataacaataaaattcagaaaatgaatgacaatttaaaaataacacacctgctaatcaggggcagaataaaattactcatttgtacacagatgcaatttcaaatattgaccttgctttcctaaaagaaaataaatacagctaaagatttctatttcaaaatggaagaacctcataccattctttacattttctttccatgctctaaatcttgcaattcacattaaaaatattaacaatcacttctgcaacaacaacaacaacaacaaaaatcccactaatagctacaacccaattcaatgctgtcgttttgacggaacatactcatcagaaatcacaaaagaaaccatgcagttagaacattcacaggtgcctctggcaccgagaaaatgaagcaataaagatcagttgtgttaatgaaaaaccaatgcaaggatatattcaagcacaacagtcccaagtacggcctagaaaaattttgtaaacaaatttataatgaatgatattttgtgattttaaagttaaaaggtactaagtttttttttttttaaattcatgatatagctagctgccctgccaaactttgattttcatttagcctaattacaaaataccaacttggtcatcaaagatttgtttttgtaatacatcagaagcacatgcattacaaacctcttataattttccaaataataataatatgaaaattttggaaacatgccagactagagattgttgggcttaatagatatcaccaggaaaatcttttaatatttgtccattaagtttcagctttgaaaactcaaatcgataatcacaactgtggatgctcaagggtgataccaaaactgggattatgatgttcagagctgagcttgaactctgaaaggaaatgcaagcaaggtgtacttcaaattaggtaaagaaagaaaacaggatgcatttcttctttctatttttgtttctattttaattcaagaagaacaatgataaatagggatgtaatggcaattatggaagcaaaacacaaaacaaagcactttttgatgttctttctttgaatctccatacttaagaatgtaccaaattgttaacacatttaaatatataaaaataaaccctataaaacatttaaaatacattttaaatattttaagtacactcatataaagcatgtaacaaataaaattatttccactttgtttcttttaaactaagaactttttgatataaccagccactttcaagcagaagaggtttattagaatacaaaattatgtaatgtttatgggtcatattaccatatgagcacagaaggcagttgcaaccagaacacattcagaacatcaaaaaatacatttcagagcaagtaattctacttattctcctctttacaaagaaaatgtgttcaacactactgttttatcagtaccagatttataagtggacaacagatgtaaagcaaggataaccagattacaatccacaacctcagagaagctaggtaaaaaggggaaccctaagaaggacacaaatgggaggccccaggagggtaaactgggaggcagggtggaatggtggggatggattatgggaacattagggatcaagaataccaagttgggggaaggattgaaggggagagcaaagaaagagatatctttatagagggagccattatggggttagggagaaatctggtgctaaagaaattctcaggaatccacaaggatgaccccagctaaggactcctagaaatagtggtgatggtgtctgaaccagccttcctctttaatcagattggtaactaccttaattgtcatacaacctacatccagtaactgatggaaggagatgcaatgacacacagccaagcattgggctgatctcctggagcaaggggggggcaagaacaaaatggggaaatccagggatacagaagaccagtgctagtaggagctcatagactctgagctgacagctcctagagaacctacatggaaccaaagtaggccctctgggtgtgggtgacatttatgaatcctgatctattggtaagttttcatatcaaatatcaaactctgaaagatatatccatacattttcaataaaataaatgtttgacaacttaaacaaactttacacagtaaaaaaggaatatgacagatataacacagttatatcacacttaggcatatagtcaaaggattctaattcctactatggacttcataaagaattaaaactatttctcttttgaaaagatctgaagcagcctaataagaataccatatttaagcaaaatatcccaaatatactagtcaagcctcaatatgcatacttatgctgactataaataaaatcaatcaaaagtatcaaagaggaaagcaaatttgcaaatatatatgtatatataattcatatttatatacatcctattattagctgactgatgaatcatccattgtatagtgaaattattaacaaagtgcaggtttttttgaagcaataacaaaggacaaatttgtgctttccttgaaaaaaaagtacctttacttgaaagggaaaacaagttaaaagttcagtagtacaataaatagaaacattgaacttactgggagcatttcttttagtccagaacggaggaattcattcctcaaatgaattcgaaaatcaagatcatatggagaagtgacaagtgcatttatgaactgcatgcatgccacctaaaaagagaaagtaaatgccatttatatatttaggtacagtaaagaaatacttagctaatacatgcaggtaacagattcactaaaggcatatggaatgcaagtatttctgtaagtatattgataagacttcgtattataagcaacattagcaatcaagattatgatatccaacataattttaacaatatgaaagttaagtgtgtttgctttgctaaactatatgaaaggatattaactttcccaaagaaacttcaggttcccaaataatacacactgaaccctatgaaaagatcatgaaatgaattcttgtatctggtttccacagatagtaagggaactaatttctacatagctataaaaacatttccagctgggcggtggtggctcacgcctttaacccctcttgggaggcagaggcaggcacatctctgcgagtttgaggccagcctggtctacaaagctacacagagaaaccctgtctcgggaaaacaattaaaaaaaattccagtataaatcaaaaattttgtgaagctatattagataactttgagatatcactgtattagcttgtattctttccatggaagtacgttaaactgatgtaagtggtgttcttctgtaagagtttaaaaattagaaaagaaaccactagatggaaaccaaacaatagagagtacatgaaccagtttattacagggtgggagagcaagagcgtgggggtggggaggcagtaagagagacagaacgagtgagagagcaaagagagagaggaaggcaagagcatagcagaacagagaataattagcggttgaccactggaaacagagagagagaggagggataagggtgcaggctcaaaatgggaagcgtgcgcatgtgcagactccctccctacacagtcctgtaatgtgtgatgtagccatgacgtggcaacgcaacaaagggcacttcgagctgcctaggtatctgcctgaacctttcatttccacctttacttattattaaaaaggtggggagttaaacatggccagatagggaaaannnnnnnnnnnnnnnnnnnnnnnnnnnnnnnnnnnnnnnnnnnnnnnnnaacctgggagtattgactatcttgggggacctgagagaactggggtgctgccatgtcctggtgtagctggttgtttatatgagcagaagagtagagtacaaggaaactcaaggaaaatactaaattttacaaaaattataagcatatatagaaagatgaataaaccaaaaatgttgaaaacaaactttgatagaaatattgcatatgttgacttcaacacaccttgcattacatatcatttttcaaaacaatgagaaaacattaaaacatatattgcattaagtttgtatcaaaatgttatacactcagcttattgttcaaatgtaatataccaaattcaaatgttttttttttgtttgttcatttaaaatagaaagctgagcttgttaacaaagttaccacatagagaaaaagtaattgaacactgcattccaattcataggaatgctcaggtattcctagaataaacatttggacaactaaatgtgtatcaaaaaactttgcatcaccttaaaactaatactggatgtgttgttaggcattttcattctaattgattacaggcccctcctttatacaataagaacctgaataaatctttatagagtctcaataggctagtatatgtgtttatatattgtatgcagtgctatattattttcttgaatgagtcttgttaagtaacaattatgacatgacttaacaagacaaagcccaattgaaaattaatagaaatgtttacatatgctagtattctttttgccagaaggaattctagcttaataatgtatattttaataccttacaaataaagactatattctcataagaaataggttagtaaatcttgtaacaatatctttatagaaatagaagtattgtactaatgaaataaaatagtaaaaattaaaattactaactacagcaacatgatatcatatatcattataaagatatcactgctatgaagtactttacagataatgtatacaaacatggctggatattttaaaaaaaggtgaacatagagtctaccatataaaataagtaggatatgactgaaagacagtagtcaaaaaagaataggtaacaaaatgccaattatggctcaccaaattctacaagatctctcattaataacatgccaactgcaaaattaaaactcctagggaattacatttaaacacacacttactagtaaggtaagaaaaaaactgttatttgtcctcatctatgctacagttattctttcagagaacaataacttaggaattaaaaactaaaattatcaaaatatcttacatgaaaatttaaataatatttcaagaagcacaacaatttattatgaaatatcattgtgtggatccaatatacaaaatacaaatagctgaatgcaaaaatctacactcttatctctattgtataatttttataaatttttagacaatgtattaggtgcttaatataatgtactatctaaagtcactctcatagaaaacaatgagatgtaaattacaactatatttctttcacacatggaaaagttgaagcttacagaagataaatgacttatgcaaggtcaaatagcaaaagaaaattatatttctaagttacactattttatgtcaagtagaaaacaattccagaatgtttcagatatcttagaaactccacacaaagattaatacaagaaaaattttaaggttgtataaggtgacaaaacgtatctgtagcatcatgtttggtgaattagaacatctacattacagctatccataattataaaagcatggaaataatgtaacaatatgttgtctagaacaagaagttaccaaatatataaaggagttaccaaatacataatgaaacacaaataaaaataggtaaggacgaactgatccttggtttggagtacatgtcattccatatacatctcataaagtatcatattgagagcatcccatagtcaaattattttctcctcttnnnnnnnnnnnnnnnnnntttgctctcccccaaggagttccatattacatgagaatgtgcattcaaatacaagtacatgtatattacagaactctactattcaaaccaggctcttttaaccacagattaacttcaataggaactaaatcaagaacttgacttgactagctatagtccaatggcatgaaaaatacatgtgatttataggtcccacattggacaatatgaataaaaaatactgcagaaaatttgacagaacagaactccatggggaacattaaggaagatggggttctggcctgttagagctcagactgaaatgactacaaacctcattcccaaataccaaaactttgatgctcagcacccaaggatataaatctttaaacatgtgactgaactctattgtcctcttagagagcaaaatcaaactgattttaaaataatccctctccaaagaaaagaagtaaacaacctaatattgtttcatatgtgggttacaaacatgaagtgatctccctcaactgaaaacgctaataagccaaaaagaggaaactagcaccacttattgtagtactgcagtcttctacacattacaatgtgccaatctagcattgctgaatacaatttaacttcaacctcttaccagaaagaatacaaatgtacttgaattgaatagcacaaattccaataaccagattcttctgtttttaagaatttttttaagggctttaactttcaatgtggtttttccattttttatttgtgcttctaatatagagtcaatgaaaaaatagtgtttaaaaatatcacaggaagtcagtaaattttgctcattgaataaaaatatgcactggtaggaccataattcttatgctaaacaagtaagtacaacagtgcctgttcttattaaattgtttttaacataggaaaatttgatgttatctgtattttattcatatgcatttaataaacatcccatgtactagatatgtatacatgctcttataagtgcatataaaatacatgaataaaattaaaatatacaggaatgtcttcacaaaataactacgaaaataagagaagcttttatttcaactaacaagtttcagaaagtgcaaaaaattgtctgcctgtttgatcacaattcttagagttatggagtacagtaattgccaactctagggcattctcagacagattatccatattgccattagctgtgacaaattgcgcttttaaaattttattgacactgtcacacatttgaccttattaagtgctctgctgacattaacaaggtctttctttatcctagccacagcaggagttgggggaaaaagattgtttaagtcaaaataagtacttactaagaactattcaaatgtacagtgcaagttaattaagtcaagaaatggagaagaatgtctagacaaaagaaggatttatgtacaaaggattagaagtagagagaggaaattgcacaaaatgttcatgaaggagagcgtagtatgactccatcaaaaagtgtatacagaagactagtgaaacacacaattagaaatctgtaagcaggtggtgacgtgcttttatctattcgtttgggaaggagggacacaaagactagattttaatcctagaagtcataaaaagcctttgaagaattgtaagtagtgatgtgccaaaatggcatgtcagaagagtgactttgccggagagtatttaaagggttagaatgaagggtagaagatttaataaaaagaagtcagcacaaagactaaaataaagagaattccctgaaatttaaaagaaaaaataactactggcagcagcatagcgattagagagatactgtgccttgaaagaagtacaaaattaacatacaatccagtatgtactgtctgaaggaatgcaagacatatagtactatatatatatattacaggtggatttgaagccaactattacatttttggtgtatgttaattcttgcataatgatcaggaaggaaggaatataagaaaatggtaggtcgtggtgagaaaagacattagagaggttcaggatgtataacttgaagatgaacatagttaaatgtaatgcagaacttgaacattctatgtttgaaagggagaatggactgggatgcaaagagcataggcaaacatgtatctcgctgaactcagaaagatggataagacagtgggcaaatcatcaaaatgagaaaaatgaagaaccaaaggtcccaagatacaactttgtctcgtatgcacaaacctttggtttgaattttcacaggtgtatatggggtcatagatcctaaaatcagaaagggatccatgagaggtttggaaaaagttatcctaagagggaggttcgtgaatatttttgacatgaaaatgaaatggcagatactggcagaagaagaaggagatgagcacagaaaagaagcattgcgaaagcacagaggagccgaaaaggacgggcacaagttaagtatgtgtagtcctgctcaataatgccaaatagtgctagaaagacaatgtgatagctttgaaagtagtctgctccttttcaaacgcttagaatcactcttacctactactgtaataatatacacaattattcatcatctttgaaacagatttaaaagtgaaggtatacttgaagtcagaatttttcttgttacaatgaaaaggtaacactattgtccaaatttgtctacacaatggtacactactatgtatgtatatatgtatgtatgtatgtatgtatgtatgtatgtatgtgtgcatgtgtatgtgtatgcgtatatgtacgtgtatatgtacgtgtatatgtacatacatacatacatacatacatacatacatacatacatacatatgcacacacacaaatatacatgcatacggaagtagtataaacttggaactcagctcattggcagttaccttagtttcagaagtttactaaacatctacttagctctcccttcctgcacatcttccaacttgtgcccttagtctgccatgaacagaaatcagatgctcagtctcaatatgataatgcaagaaaacaaacttaggttctgattaaaggctgccaggtctttcttttcatgaaaccggtttgatagacttgatgatttcaatgaaggatcaatgtttgatttttaccttcatttcattattggttctaatttatatgccaagaggatgcctatacaatgtaaatgtagtatacctgagagaagctatcacacattatgaacaatacattgtgtgaaatgcttttgtgtactatattcaattattataccagaagactttctccattattctgatatactagaaagcagtttaatgtctaccataccatgctaccacatttgtctccacaacttctgaaattctgcaaacacatgaaagatttctgcctaactgtagcctgagaaaatggatgagtttaacatgcattcactggatgttaatgttaccttctctacctataaaagactactaatggttagcttactttgaaatttcctgtcttgctacacagaaataaagttcaagcggatgtctgtatggtcttctgctttcatttctaaaattacaaagactatggaggtctccattttcacgcactataagcccttcttgcaccattcaaatttattatggcttctttattagaaaacataatatcattgaaattcttatctttgaaagccaactcaaatatcacctcatgagatacttctataattctcagatttgctgtgtaatttaaatgagattacatatgtaaattgcaatgttattgtggaatagcactcacaagtgatatttttaatttgttacttgtgggagtctgataaaaaacatgaatatacatgaatatttatgagcacatacacatgttggcacatatacacataacaacatataagtaggtgcatataaaatgattattggtagaaagtagtgattaaaaaatagtggaaatattcttgtgaagaagagcaaaaatgcattagaaacagaataaatgggtattcagacaccacccaaaaagagtggtgcccagagaagcaagagaagtaaaattgtcaaatggtcagtggacaaagccaccattgggaagaaatcattggttttgaaattatgagaccattaaagatttctttttaagacagtgacaaagataagttgtgaaagataatttagaaaatagaggaaagaagtatagattgttctctgagagacaagtgctacaaggtaaaaaggcagatgagaggctagcaagtgtaaaactgcaggtgacacagcatggcagactgaatagtgcaactaagctgaacgtaaggcaatgaagagagtacatatgttgatgtaatttatccctgatctgttcctgaaactactgaaagtaatgaaaatcctatcatagctgagctagaaaacatctgtaagaaactgttgctttaaaatataattagttcagtattttaaaagaattacttcatgatattctaataagagatctcaggacactaccaaaattgaaaagtaattctgcaaaaaaaaaaaaaaaacacaaattacattttttaaacaacagagctcagcttttgtttttaatttcagtattctgaacacattttagaacttttacagaatattttctcattcacattaaatatgcctaataaacccacttcacaattcttgggagagtactaggctctgtatataataaattactaaacgttgtagctcattaaattaggaaatttcaaattgtagtttgcatatgtttgcatccataatcagtattcaacaatttcttgaatatttagcaagatgtctgcaatttctccatatggtacttgttaaacagttgcgacttaatcattctattctgtacagcaccatgaaagccacagaatgtcagtaaagtttcactgactggggcaaactactctacaatgaaaacatcgcttttttatggaggtgttactataatggacatacaatataattcgggatgtatatatcaaaaatttaagttcaaaccaccattctaaaccttaacagctttgtgattcttagagaactaatcatgaagccttcgtgcaactcagttccctgatcagtaaacttaaggtaatatataacacagaattgtggctgaaatttcatttaaatatttttaactattcaaatctatttgtgccacatatggcaaaccgttgcaaatgcaatgaaaactttgaatctaaataacaagcttgagtcatgctaaattttgaaaataacatacaggcgtatatgtatgtctggcagtgaaagccatctaggcaagcaagcacagccaacacagcaacacggacaaaacactggagaagacatctgaaaatgcatatctcaggctttccctagaaagtatgaaattttagtgaaactaaaactaataatatggaaaactgtgtcacagataggaaaacactaaggggacattctcaattttaaaaacaccaatgcaaaagagaatacaacagaagtttatcaatatactcatcatcgttgaagtagaacaattttcaaagatatttttacatttctaaagaaacattatgtacagtttcacagtactacagattctccttggagtggccaattcagctgccgaacacagtttccagctgtgacagaaaagatgccaatacttcataaaacaataaaaaaaaaaatcgattgtttgtttcacatcaagtagaatatttccatatgtatactcacaaaaataacttgaaaaaataaacatagtagcaaaatctctttgagtgatgatataactttttaaaagatacttcgtggagcatcaaatggtatatacactatctaaaacaaagagcatgttgacatcaaattctggttcttccacaccatgtccacttatacaagtgatgcaatctcattctacctatccacatgataaatggataatacttagggagctgattcattacaagaattataccaaattatattcacaaaataaaatgtgccattcagcagctcttatctgtaaatacaggcaataaacatgacttctcatccctcaagaacaatgtatcctttcataaagtaagacatttcctgaaatcatgaaaaacaaaagattttttcagttttagaactaagcatgtttagactgggtctacagagttttcacagggtgcctgacacgggatacaattcagtccctctgcattagtgagtctgatttctgattgtctgaaaggcacaaagagaagtatactgaattctctttctttaaattgtttttttggttgattgaaacccaggcaagtcagaaccttgtaaccctcctgactcagacttcaaactgctaaagagtaccatactatgacaccatacctaactattttcttacatttctacaaaagcctatagctttattaattggtcaaatactacagacctaactgtatgtcctttggcccatattactgctaaagcttcaacttcccgacaattataataacatatgccgtattagtgacaataaaaaagcaattttcttaattttaaatgactttaaatgaacaaaactatgagtaacacaaataattgtacttttacattccatcccataaatgccagctaaaaatgaattggtataatacaggtcctcgaaatataactcttcaagtgatttatgataaaacaaccccacctggagttgtaaggcttcatgattttccaatccttccacaattggtgaaaatcgttctctgttatttctttcagctgcagcactgatggcccctaaaagtttgtctagactacagacaaaacaagagaaaaaggaaatgaggaatatttcatatgatgaacatagctcattctctattttattcttagtgtttgatgtttatatagaccattaaatgtttcacatcacaatacttttaatagacaaaaccttcaaatatttttagtatataatacaatgtttttaaaaatattcctgctatggaacagctaactggagctaattaatatacatattactatcatatgctaatgttttatgagctgtttttgtttgtgttccaaacatttacctacaaacttacactatgttttctttttattggataagttcatttaatgttaagttaccatataagataaagtaaaatacaaggatacaatagtacaaaggatatacctgtttcaattaaagatgcctgaacacacatgtgcatatgtgcacgcgtgtgtgtgtgtgtgtgtgtgtgtgtgtgtgtgtgtgtgtgtgtgtgtgtgtgtttcctatgtgttctcaaaacgttttcaacttaatccatttccacttaactgatgttatcttcagtgagacaaaattccagttgaataaatgaatattttaaattcatctttaacaaattcagattatataatatccaaaaaggtaaaatacaaacaaaataaggatatcaaccaaaaatattctaagaactactgtgtttctgcaagttatcaaaaagaagaaccattaatttctgccatgtcattttgcaacacaataaacagaacctgtcgatacttacatgttgtcttccgcaacaatgcaaatagcagacagtatttttactatttcagtcatcatgttgggctgtttggggtcaattgctcttgccaacaataaaaggctcctctcatctcctagaatcctttgcagtccaaactaaaaacaaacacaatgggaatgtctatggaacatatttttcattccaaataaacccaaaataaagaaatgtttcaaaaaaaataccttcacagtgcccttaggtatctaatgatttggattttcctcaaatgcaatcattcattgttttattttatttgaaatggctacatcttagaaatttgagggcatgaataaaaatgatttccaatattcctcaattacatttttgaaaatatataggagaaatgtgggaacaactggtatttgtctaacaagcaagaacatatagaacatacactgcctatattttctaaagctacttttaatgtcttgatatccttgggaatgtctagaatttgtggttaattttttccaatatatttgcactgaaatttaaagtaaacacgggagggaaaaatgcttaagtgcttcaagtatagtatatagtcgataaagtactaaaaatatgatatgggttttccccgatttccttgtccttttatatcatatctcttagctagcaacacatattatagactcagagacataccccagtcagacaggcaaagaaaatattagtctcactcattttctaggcataaacctaagtgtataagcacatgccatacaaatgccaataggtaggttttcaaatccaaaattaatggtaagatgctactattttcacctttgtctcacaaagtatatttctgttttctcagtaaaagtttgcttcttttttctctcccttttttatttaaattagaaacaagattattttacatgtcaatcccagttccctctgcctccccccaaacgaacacattgcctatcccataccccttctgctctgcagggaggtttaggccttccatagggggttttcagagtctatcatgtcctttgggatagggcctaggtccaccccaatgagtctaggctcagggagtatccctccatgtgggatggactcccaaagtctattcctatgctagggataagtactgatctactacaacaaccccatagatttctgtgatctccactgacacctgtgttcatggggtctggatcagtcccatgctggtttcccagctatcagtctggggaccaagagctcccccttgtttaggtcagctgtttctgtgggttacaccagcctggtcttgatccctttgctcatcactcctctgcaactggattccagttcagttcggtgtttagctgtgggtgtaaaattcatttatatttttcttgtagtaaaacataattctaatattgttcttgggaaatgtatataaaatgaattagattttatataaaatttgtgacatctttattgatattttaattaaaattcttaattgcttttttcatgtttcacccagaaacacccacaaattcctcatccatgtgaacatgctgtgtatcatactatcatagtttttaatgatgtagtttatctgtacttggtttgtaatgtgagtgcatatgttttcttaaaattgtccatttattcagtacttataatcaatatgctatactataagcagttaagaatctgaaaaaaattgcttcatttcaagttagttccatggcaacattacatttcattgggaaacattatatgataacatttggcaaagtaccaaacataggaacagcatgaaggttcttaattaaattctaagagaaaagaggagcaggctaaactttttaaataagactttactgtgggctttaacacataaggcaacatgcaaatgtttatgagtttctgacataactaacctcaacgtcaagtgtcatttatgtcatttcagatgaaatttaccctcctcgatttggaaaatgtattccaacttaaagtgaatatatcactgtgtgctttctattcagaatgtctgttttatgcattgtttcatatgactatcatttaaaggacttgtttattcatgtgacaaggatatatatctaaatcataaaaatagcttcacaaaaactccaatttcgtttcgaataacttaaatgaaatcatcatgttcttcaaaactgccaaaaacacataagaaaaagaaagtgagtcttgccatatctgagtatctcctatgggaatagggctataaaggaagtcctacaaactaatataacatactttagtcagtattctaattataattagttgttatcctacaaaactatgttagttgacaacatgaatcaataaaaatgtagcacaaaagctcccattgctgaatttacagaggaggagactgattggccaggggctatgtcatttttcaaaggccccgtctgcttaggactggaaatgtgatgtgcatctctgatctccagtactgccctctctttttgtaatgttacaacttttttcagttgcagaaagagatgcttcttgagctctggagaaagcaatgttcaattaagcgtattgttattagtcattggatgccatgacgtgttgtatctaaaggtgaaaagcacagaagaagagaagttctcgaccagtactgataggagtgtttctacaagaaacatacagatgggtaagcaaggtagctcctgggataaaggtacttgataaaacgtctgaaaattaaagttggatccctgggacccacatggtagaaggagagaggtgaaaccctcaatttgtactttggacttcacatgtatgtattggtgcattatgcatatccataattaaatgtaaaatgataataaacttatagaaatagcagtaaaagtatatgtgatgaaagagttcattagcaaccatgtactgcatgtaccaataataccatttgctgagtaatatgggcatatgatacagaaagtgatatataattgcatataccaaagaacgtgtttgtatattatgtaaatatacagtattactgcattgattattaatagctatcactcacatttagcaagttcctggttattgctataattatttatttctattaagtaattgtttttattaaaatatcaactaaatgtaattaatgtgattaagcatattagtcagttatttaatctgtaagactccacaatattatatattaaaaatagtattgtatgtatacaaaaatgcaagctatctcccacagatttcttttacacatgttaaatcactgaaactgaaatgacacccttatcaaactatttgaaccctattcctacccttgaattttccttttaaataaaatacaacttctttctttgtatggaaatgatattcaatttatgaaatgtaaatttacatactgctagggtttaagagatgcttcagtagttgagagtacctaatcctatagagaatccagattcgattctcagcacccacattaggcagctcaagcctgtagctggagtactaggggatctgattccttctatcctgaatgggcacctgtaggcatgtcctgcacatcaactcatctagcaacatgcataaataaataaagcttaaaaaatgagacttcattatatcacaaaaggaaatatgtgtcaacaaatttgaaagctaaactaatattcttgtcataaatgcaaaatatggcagtaaatattgcgggaagcaaaatacacctttgaaaccacttataggaaactcatgatgatctacaccataaacatattattaaaacttgaatagtacccactgttttatctctttcttacttccatactgtcgagcaagctctctccttttgtaacagagggataagtaaacaccatttaccttattattcataaacgctttcaggcactgaatgagtttgtattgattcttcttgtcaatattttcttgcctaagtcagtaagaaaaaagaaaaaaatattacattgtacgtaaatttttcccatgtgtgaaaagtttttttgtgaaagttttttaaaacttcattcttactgttttttgtctagaagcttttccagagcatccagtaagagtccaagtccttcatggccaaagttgttaacccagctatgagtggaaaagaatatataagtaacttcacaggtttaacagtaagatattaaaatgaaaatttcttttcaaatatgataatcctgccttattattattatctttatcatctgataaaaggcttgatgctgagaataaccctgatatcatcatctgaaactcagacctctcttcatagtttccttacccctatattgcacaattttagatagtacagcttcacatatttaagccacaatttatgaggtaaattcatcttccattatttctactccctcaaatcaactcttcctccactctacagtattctctcagtaacaccattgccctttgattccctcaaacctgaaatactggctaaattgtttgacctgccattgtccttcaccttttcatttattctgctcatttcataaacagccgttgagcatttacaaggtaccaagtatgtatgtaatacagatataatgagcaacataactaagcccttatcctcctagagtctactacctacaaataaagagataataaataattaaccaattatataaacatcagtgctttattgcaatgaagtaaaataaacttagctaaacaagtaaaatgccaggatgcttttatttaatatgtagcctgggaaagatctttgaaagattctacctaaaaggaaaactgaagataaataggattatatgagtacaaagattatcagattctagagattttaaatactatgttttgaatattccacaacatccgtaggaagaaatggattagtgggactgggaaaatagcacaagattaaatcccagttgtgttagaatactagctcattgcttatccaatcatgaatactttcttcttcttcttcttcttcttcttcttcttcttcttcttcttcttcttcttcttcttcttcttcttcttcttcttcttcttcttcttctttaaggcttcctctaaatgcccctatgtccttttcattgtttacattaaaacctaatttactcctggttaactttatcttatggctgaagaaaccaatggggttctgtgtagcttcgtttttttaagatgttttgttttgttttgttttgttttttgcttttgttcattttacatttaaaatatctgactgataacatttagtcatattcctcagtcctaaaatgcacttggattacctcaatatctactcagcctaacagtttcatcaagtctcgatctacctttccagactgagaatttataccacattggccaaataatcagacaaatgatcattactggagttctctctgaacctctttgttagcttatttatcctatcttcaaggaaggaaaccacaatattatatgtcaaagcctccaagcatcaaacaaacattttaaatcattaactatctctccagcccttggaaatcgtcaaccaaatatgggttcttctttaaaacacctacatataatcttatctcttgatgtatgacatggtttttgtcacatacattacagattcacttagattataaattccctaaagagagtgtctttacttagtcatttctctatcatcattgcccccattagagtagcttacatacgctatatgacatatttgtaatcaataaatattaattttagtttagtatcttaagtaaccacagataggcaatctgatattgcccaaggatttcacaaaacaaaatatatacacagatgcttatgaaatagccattaaaattgctactaactacatatatacacaaattttacaacactggagagaacataccaggcttcatacatgctagacaaacactgtaccattgcagtatatgtactaccgagatactccatatattgaaactatgtgtatatttacatttcatagtctaaattttctctggaggttaatgagaataccctcataggctcatatatttgaatactttggtccttaattggcagaactgtttgagaagaatgaggagatgtggcgtgttggatgagggctgtcacagtgggataggctttggggtctcaaaagatcatggcattcccagttacctctctctgattaatgttctagaccaagttgtaagctcccagctactgctccagcaccatgactgtcagactgtcacctttatccctggcatggtgggtatggattctaaccctctgaaaatgtaagccccccaagtaaccttgttcttccataagttgccttcatcatggtatattatcacagtaatcaaaaagtaacttatgatactgcctgtctatctctcatctaagaggcatatatcagcatggttaagaatctatatttctaccagattaccagggagagcaatcagattactgaagaaggtataatttaaaatagctgagattcagaaccagtcatccgcaatatatatggaagctcattttaaactaatgtggctttaattttcataatggaaagaagaaatcaacgtggcattgtaatgataactggcaatgagctaccattcaattgaggcatgtaatcatccattgcaatgagctattttctctaaagactctgaataatcagtggagtagtggcagagagatagagacatcagtcctaagtataacacgctgtatttcatctatcagagagaaatcttcaaaaatcatcatagaacaataactttaacatagtctaaacaaatctacatatacagcttccagtatctcccatgacatttgagaaaaggaaatcaaaaatttattcaaatttaacacttcaaaaatagttttcaaaatgctaaatattactcatattttctttatacccagtactattaaaattattaggattgtttctttcttcctctaggaaattatttgatagaagagaatgatttatatttgttcatttgaaatcagccacccacacatcccagacttcaaaatgcactgttaaaagcattttggattcactcagtgaaaattatttttattccaataaaagatacaattatgaaacgtaagagaggacaagtttatttcttacaattgatggagtacaaagtctcaactgaagaatcatctggccaatgggaagaagaagcctaagcagaatgctcagagttcttgcagtagaaatggcccccaagagtagtttgctgatagggggatgaactaactatgatgtaccctgatgatacataggaactaagtaagtattctcctgcccccatttttaccaacaccatttctgtcttgcaggcattaagcactgtgtagcctctagctaaaatctctctgtgcattcattgtggtaggtaggcacacatatccaacaaaaacacataaagacaaaaaagacagaaagaaacagtttaacttaattaaaacaaaatgttggcttgtacacatggctgggcagggtttcttgctgttgtttttttgttttgttttgttttgttttgtttttactataacaacaaaagtaagagttgctgaaattatgtaccccaaaccagcagaatcaacatcacggtgaatgtgctaacacttcaaattatggagccccagctcaagagttatgggatcagtccctaggggtggtgagatagcagcaacgtatttttttaatgtaattaaaagtgatcttactgcttggtcaatttcacaaccagtggcataggaaaggtttgttaagaagtagaggaaccctttttggaaacaagacacaggctcagaactctagactgctatatacatcactcccaaccacaaacactctcactaccagagcacacagaaccagtacagaaatccagatgaatcacataaggctgacaagttttacaaaatgcataaattgcagctcttaaagaataccaattggggcatgcagaatcacaagaatacagttgatgattacattaaaatctgactcaggtattattacacttttagacataaatgttcccatgttgtctcaaccagaatatatgaatttctgatttactatggatgataaattgtgagagatatagacaataacgctggaaaaaagaatgatgattaatattctgtatttaaattcaatagccatctagaaacagattttttcttccctttttcctgagacacaatttacatgagtgtaccataacgtgccacataccacacaataggaccagtaccaagatctcatggaagaattcaggattgctgcaactacattgagtttgtatctatgaacataatataaatgcattcattactcacagtctagttcataagtttctgtaggatattttacagttcatgttattgatttttaatatcctaactgtcgtaagaaatcaaagaaacagatccagagtctaaagaaacagatccagagtctaactgaaatttttacaaaaaattcaggcaaggtattttatcagcaagaatgggagacaaaaaagagtaaagaaaaagaacatgtatgttaaagaaattggagtatattattattatgttattattattattattattattattattattatgtttgcaaataggagacattcaaattaggaggtctcttggcaagctacaagacacacatccaagccgctgcttgtgaaacttcccaaaggacacaatagaactaaataaagacaagagaagcccatgcaggatgtttaatctgcaagtaatcaagaaggtagaattagagatgaaaaagaagccaggaaatacattattttctttgtttttgtttatttgtctatgttattgtttgtggggttgttttgttgtttgagacagggtctctctatgttaacttggctgtcctggaattcactgtatagaacaagcttgccttaaactaagtacgattctcctgttactgcctcccaggtgctggtagcactgagacattactctaaccatatgtataaaaagtggcagtaggtattaaacagtggaaaatctggtatgctactgaagaagttaaaatttaaagaccatttccaaagtttattggacaattaagaaaacattccaccatccatcaatgggctatactctgtgagcccacacagtgataactgagcccacacagtataaatgcctattttttataggagaatatatacagattctaattctatgtattatatcccttctgtatacgtatatgcatgcatgagtttcatgtatgtgtatatttttgtattctggaaatcttcattcatcctgctttcgactgttaagtattgggattagccaccagcactaccaacacaggttgaaattggtttttcatgttcatttaatgcaggattgagaacagtgcctgaatggaatggaaaatataaataagatagcaagatcaagttaatatttattttctatcgtattacaaagcaaatccctgaatgtacaaagtatagtattagttttaggccaaagtatattattaggcataaaagatttcaaaaatattaatataacttttcatcatttaatgaaaagtaattctgcaaaatatgtagaaaactagcccatactatacatcacctgttgattatttcaaaacaaagatgtcaaaattaaatatttggagctcacattacattactagctatgatattgttcaaaactttgtatacatttccttctgacaatacctactgctaccgattcacaccgtaaagccatggaaattatactggtgtgtgtctgcgtgactggggtgggagttataattcatgcacaaacttgaatttatgttattgccattgctcttgtctatccttcagaacttgatggcaaatgtgtactgctgaagacaaagcattcatgactcatagaacatcgagaaatcaaaactggtattgatccagaagtttcatcactactggctagctatcataatcctagaaggtgctatacacactacggaaggagaaaatcaatcaagaatcttgtttggctatgagctagatatacaggcctggcaaggaatgtctactagtacaaaagtaccataaatgtcactatctgattggatctgaggcccactccacaatatggatcccataattggcaccattatcagtatcaagaacctgtggctagacaagttcataggccctagaggagaacttctattactctgcttaatggacttagtattaaaccaactccaagtgacactgttatacacatagataaatacacatctcaaatttcatcatattagtttcttttcgcagtaggtgattaacatgtagaagtacaactcatcaaagggcagagaataagagatagtggtgtgctcatctgtatctggaaagactgtaagagccagacgcagtttatgattacaatcaaagggtgtttctatacacagtaaagcaaatacatatatgaactcacagcagctatcacagtacacacaggaactgttcaagctaaacatcatcaaattcccagcatggagtggtggatgggagcctgaagttccattcctaagccagggcctattgataattgatatacgactagaaaaggacagttatttgtgtgtgtttgtattaagggtatagttcctggtatgtgaactgtactctaatgaatggccatatacccaagagtatatacgcagcataaactagactcaatgatttaaataaaaaaaatgaaggaatatagttgggtgtgtatggaaaggaaagtagatctggaagtagtcggggtgaatataaacaatgcacaaattcttaaaaattaataaaatattattttttaaataaaatgtattaagagtttaaaagtgggaatggctcacttatactgatcaacatgatcaatgatcaaaggaaaaaaaaactttacattgaatggaagtataaaagaatccatttaacactaattctaagaggaagtgagactctcccacatctagttctccagggcaaaacaaaatgaggaaaaactttctctaaacgtagttattctattaaaagaatttaaattttgttctcttccagatctacataaagaacaatctttcacaaaacttcaatattttatcaagaattagatatttatgctcagtattagctcattgcatttctggcaaatataaccttaatatttggtggagaaaggagtctattatacacatgcataaatataaaaggacacagtgattatacgttcaatttgataagattctctagatttatagcaacctttcaaaggagttaaagctaaaattagaaagttctacactaagtcccttaagttgtaaaagcaattggtctcatgtgaaggagagcaatattagtcatgtcatccctttatcactgtttgtgcagtgctaaaggctagtagagacagtattgtgttttgtgcaaaagatttgatttctctctaatggtgctctaatcccatgtggaatccgatactacagcccaaatcactggaacaacaaataaaatgattgatacttctaagtttcttggggaatcagaaaatgggtaaaaaaatataacacatgaaacaattaattcaagtagtttaagatacttagaacaatattgtaaatgttgtctttctaattttgagacaaaaccatcatattttaatacaatgtccctgatgtaatgttcattaatgcaattataacaaaatttaggttatatgtacttggataaagagaatgagatccacatgaataagtaagaccactgtataacctaacaaaacaatattgtatatttacttcatggatcagtaactccaaaaagtaatgaaggtaaatgtcattgtttaaccacctttaaaggatgttttcttgaaggaaatcaattttataattgtcactctttcaatatatacatccatcaaaaagcagatgttaaaataaaaaagaatacaatagcaacgtgcatatgctttacctgggtttaattaaaataaagacaattgtatccattcattttgtctacatgaaagtaaatacattagaactaggcatttgaattccttgaaatgattcactttcatagataaatgcatgaactatttctgaccaattataatatacctatttgatgcaatgctgccatttccaggcatttgtgcataagctttgaagcatgacacttgctgaccgcttatttctcctgattcacaaaaaggttgaatgtgttaattttccagctttgcctctcagaggcttttcttgaatgctgtgatagattacaatttccttagaaattcccaaagaagacatccaatcgttctctctggctgcatttattctctccatcagtctcactgacaagatcctgctatgtcctatgtgattcacacccttttaagaggagaaaatgttcaccttttcaggttgattacattatataaaaacaaatttctctttcatactgttataacaaaatactgcaatacctcaagtcgcatgcaatagtcttcttaaagaacaaaactaactgcaaattttctctcagagaacagttccctattattaaaatcaatttcttagtctgcctgaattactttggagatagtctaggaaatagctttaactgtatctattttaaatatcaacaggctaggcagtgaagattattttcccctgcatctgcctttaaaagttataaaagtataatacaaagttgtatcctgtagcaataatggcgtaaattatttcaagtgtgaatgaaaatgaaaatagacttctcaatctatagtaaatagagaaaaagcaagagtaaagaacatttcccatattcaagccaaaaccagtcatattttacatcttgatatgtttgcaattgtgactataattatgttagaaaacttactaaatctgatggcttactgatctaaccattcaaatttacaataaaatgttagcttccacaagaaaaaaatgtattggtttattttccaaagctaagtaatatagctaaaattctatcatgtactccacaggacatccaatttctgttggttccattgaattttgttaaaatgaatttattccaagaaagcacattcctaatctgcaaatcctgaaaatgaaaaagggttgacagagtttatctgtcataaataaagtaagtccttgactgcaatcaggaaaaacaatggcattagcacaaaacactggctcacatccccttttttctaacccagtttgtatattatgctttctgattctgctgggaagtaaacaagtggtaaatgaattctcctgcagtataagaaaagaagggcaaggaaagctgaaggacaattgctctttgatgagtacgaaacagaaatgcaacctttcttctcacctaccaggtacaatgtgaaaaacatgtaattaacgtctcattatacatggtgattgctatgtagacaaagatcaaacaaatttaatgttcacggatatttttagcacaggatattacacatatgtcggaaaggaacaatttctttggatgttgtttactaagagcatgaaatttaaagatagaaacttttgtcttttctgtattaatctttatattttatattaaatatatctatataaaactaagaaataaactgtggcgaatannnnnnnnnnnnnnnnnnnnnnnnnnnnnnnnnnnnnnnnnnnnnnnnnnnnnnnnnnnnnnnnnnnnnnnnnnnnnnnnnnnnnnnnnnnnnnnnnnnnnnnnnnnnnnnnnnnnnnnnnnnnnnnnnnnnnnnnnnnnnnnnnnnnnnnnnnnnnnnnnnnnnnnnnnnnnnnnnnnnnnnnnnnnnnnnnnnnnnnnnnnnnnnnnnnnnnnnnnnnnnnnnnnnnnnnnnnnnnnnnnnnnnnnnnnnnnnnnnnnnnnnnnnnnnnnnnnnnnnnnnnnnnnnnnnnnnnnnnnnnnnnnnnnnnnnnnnnnnnnnnnnnnnnnaatatatctatataaaactgagaaataaactgtggcgaatatgtaatttttgcttgtacctatatgggtaaatgtatttttattcattgtattttcagtagtggaaaccatatatatttataatatacacatgacttattcataaagctgtggaataacaacatatacatttctcatatcctcatcatttttctcctatggtgaaaacagtacaaaatatattttcttagcaattttcaatagtatattatactattatttactgtatatagtcaccactatatacactagataacgtgagaaattttgtaacctttgacaaatataaatttcctaatacatttgatgtaaatgaaacttttcaaaatcattaacgaaaacacattaatcaaaacaggaaccttaatgtgtattgtcaattattaagtgaaaggtaatctttatttttctattacaatgaaataagccatctatgtagaatgaatatgtgttaacaaaaataatagctaacatatgatgtatataattattacatgataaaatatgaaagagatatcatcctttagtatatacaacctggcctatttttttttattttcagaataattgaaaagtatagtaatttataaaagatacacattttatgtaataagtctctcaagatataaacatcttttaaaggactataatgttatgaatactacaatttcattagccttctcaaaatgctaatgacatttgcttgtgtgtaccagggagatcaaaccgagagacttgcacatggttgataagtagtctaccactgagctacatgcctatccttggttttataaaacaaggtgtcaggctggcctaaaagtcataaatgtaatcagggcaagtctccaagtcacaatagtcctgcttagactctctgagtagtggaattataggttcattcactatagaaagtgtaatagctacttttctcctcattttggacagttaaacaccaaataaagtataatctttttggaagaaaagatgcaaaagagggagggaggaggaaagggagggaagcaggctgactgggaataaatttgtcttcatttgcaaataaactgttacaaaataaaacactgaaatgtatagctttactgatcataaaatcaagtaagttactccatttcccagatgaaaaatataaagttgactacattttctttggccacaatgctaaatagaaaaaaaaattatactcagaattatactcagcaatttgcaattgctaccttcctcctatacaagttcattattaacaactcaacaagtaatataaaaattatcagttaagccagatctactgcaacacatcaaagttccatgtcactctgaggactgaagctgaaggatcacaaactcaaggccagcctgggttacaaaatgaagtctggcaatacaggtcggtgtataatgttccgtccccagtagtaaccccaaacaattttgttgatagcattctttgctgggtttctctttcatttcatgatgtaaattataccttaaattcaccaatggatgtatttgcttgcaaaaacaaaaaacagtaaggtattttcattttgattattcattttgttttccatcatgaaagaaagggaaactttaggcaataaaaatagtactgatacccccaaatacactttttgttgcacagtattctagacacaggttgtgaaaaattcagcatgggctctaacacaatacaaacttcttgatactcattatagaacctgttccttccatctaccatcctcataaaacaatagaacatccctgaaaatctattttcctttctacttcctaattaataccatatttctttagagaagaaaatactacagaagatggactatcaaaacacagagacgtaattacatacaaacatttaaaattaacgtcaaaacatgtagtaaatatgagttgatagtcagtctgctagaaaagtattgagaagtctctagcgaaaatgtaatagttgtttttggtttgggaatagcagtgcttgtttgacattacagaattctctactcagccagaatgttgcagactgtcatgtgccatccctgtccactaacttccttacttcatcatctctttgaatttcaaatttcaaatttcccaattttcaataaattgaatgacttccttttttgttttgcaaaaccaacccccatcctctttcaatgatgtccttttccaaaaggactaaggtgtgaacaaaagttcagtaatgaaatagaaaagctctgggagtgatcaaaacaacaaaagtaagagcaaataagatgaaatacactgtcaaaggtgactccagatcatatgcacacggcagagatacaaaaccatgatgggataagagaactcccaacaataaagtatattcatttattcaattgttaaaaaaaaacaagggataaatggttcccaggaatggaagtggcatgaactcctgaactaattgggagcatnnnnnnnnnnnnnnnnnnnnnnnnnnnnnnnnnnnnnnnnnnnnnnnnnnnnnnnnnnnnnnnnnnnnnnnnnnnnnnnnnnnnnnnnnnnnnnnnnnnnnnnnnnnnnnnnnnnnnnnnnnnnnnnnnnnnnnnnnnnnnnnnnnnnnnnnnnnnnnnnnnnnnnnnnnnnnnnnnnnnnnnnnnnnnnnnnnnnnnnnnnnngtaggctgggggtgggggaggagggatggaggtgagggaagggagaggaaaaagggactttcatgtgaaacaagctggttccctaactagaactaataaataaattaaaaaaataacaaccgaatagttattttaaaagtaagttgaataatttcgtttgatttcaagacttgcgagctcacaaacagaaaaatcccagcaacatgcttatatatatgtcctcacagcatgcgagtaacatggttcttcaatctctaaagaagtgtttggttattcgtatttatctagcatcattcatattgatagctcagaaacgtctagtcacatatttgaaatgttaatctatttggaattctttctcctcaactcaactcttctaaaatagtatatttttaattcccaggctcatttaaaaggagaaagaagtcatgaaagtgaatgctagaatcagcatgtgaattattattacttgtaaataattcaaaaataataagttcaaatagcatataatatgatgaatgttttccaatgttgaacagcaaagtaagagaataattagtgtcgattaattgtgtatttcataatagctaatggagataatttttaatgtccatagcacaaaaaattgataagtgtttggaatgatttatatttcaattaccctgatctgatcattacacattacatacatctattaaaatgtcaaaacctgtcctataaatatatacaaatagtatccatcaattagattttaagaaaataatttcagataactaaataaaagcctcctaatgactaaacataacacatcctctattccattcccagaagaatgtaatgatgaataagtaaatggaaggaatactttacaacttacagtgtgacttaagatcaaagagtatcccaagattgatggcctctcacaataatagcattatgctatttcaatcaaggttcatatgctgggctctaacacaatacaaacttcttaaacattttctatatgaaagaaatattcattaatgcttaatacagatatagatttggatctatttcagggtgtcctttattccttgacaaataaatattaatccccatggggaaatttatgataacataatttcttgtaaatctgtttacagcacttcagtcttcagtaccttttgataaatgaatattgaaaaagcaaatttaagaatgcatctcaaagaaactcattaggaacctgacatcaaagaaggtacagtacaatattaaaacacatgccacacacacacacacccacacaccaccaccaccaccatcaccaccaccaccaccacctacatagatttcgactcaaaaccaagggatatattcctgaaaatagggggaattggagacaacctgaatattatcagcagcactggattttacagaagagatcaaacatctagctgtgggtttatttgggatgaaagaaggctttaaaaccatattcatgtcataggctgctaaacaatctcacctgaagctcatttacttgtaaaagaacactgtaatatcatgctcgtttctacattctgcctgtatggattccatctcaacacaaggttttcaggttgaagttgcctcaagtgaaatagccttactgataggtgggaaatttccccaatttaaatgtccattatctaacatcagtcaaacagctggggtcgaagagcaactactgttgtctagtgcacatggatctcctctcaacaatccacacggaatacttagctctcctaggtgtgttagctggcatcttaattgtgaattgtcagctatccaactcctatcaaaagtttagctgagatgatagatatgcccaggggagaacctcaggggnnnnnnnnnnaaatataataaaccttagtaacaggttagaatgcaggaaatctgcaactagtactattactataggtgtgagtagaaaggctccatgtgggaaaagaacagtcattcattcatagagattctctgtgtttcatgaaaatttattgaattggtttgtacagtatctctgatttgaaaaacatgaaataaaattctcaagttcaaaattaggaagattccccccctttaaatcatgaatgcaccataatttacaggtgaaaattctgtcttgcaatatattgctacccatgactcttcagtacaaataatatacactcagatcattatgtcacaatggaccagactttggaaatgaactacgttctcctctattttagatgcttattctttatattctcacatatcacttaaaaaaaaaaagatgtgaccttggtggaatatccacatcatgtaaaaataaaacaaattcaaacaaagagcccctatttatcataactatactgaaagttacccattaaaacaattcaaagacttgctcagctttgggtgtgcctaatgattttttggtttatttgtttgtttgtttgtttgttttgagacaggattactttgtgtaaaagaacatgttgtcttggaactagccttgtagaacagtctggcctcaaactcagaaatccccctgcctctgccccgtgagtgctggattaaaggcgtgtaccaccacagcctggctgcctaattccttttaaaattaatatagcacacaaagaccttgtttccttctattatgaggtataatgctgaatgtaactaaggcaagaaaattgcattttaaacaaatatttcatgattaaaattttaaggtttcttaacatttaagttagtttggtcaaattaatttgtatgtgcttgagactaattgataatactgaccaaaaatttaacagaatgcatgaaagttgatataacagcaatgactgcagcattttctattctctgcataaaagtactactaatattctgaaataattcatgtactagaaacttacagcaaacaaactgcaaacataaatattaaaaacctgctttagtaatagtactcaaaatgctgccttctgagctgtgcttacatttttaagtcctgttcccatttctacaccataaatcattgccttcattattccatttttcataggtagctctcaataaagcattctaggagtattgatctgtacttacctttatattaattctctaagtagtgttggctgcattgccaagcttttaataagtttaatacaggctgtttaaatagttattaacactcataattgagaaaatacttctattgctaatttgtactgctgtcaagatccagctacattcattacactgactatgttaaacgcatatttgttaatatgctagaaaatgtgtttaaacataaatgaaagaactatcaagaaaaaatacatcagagataacacaaacaactgcacatttgtaaactcgagacaattttattttccattttcacatgtgtgaaaacatttactgaggaagccacagtcacaggaagtgagcacaatcattttgccttgggtttggcagaaattcagatactcagcaaaacagaagaaaagtttccaagcatgataacatatccctcaagctacaaggatatttccagaagaatgatgaaaatcatcctattcaatcacaattctaggatgctattttttaaaatatttaattattcttttggaatttcagacatgtatacaacatctcttgatcacatccacccctcatttccctcctttgattttccacagagcccttctactccaaactccatgccttctttttcaaacaataaattccattgttcccagttaatgctggccatgtgtgtgtgactgtgaggccatccactgaagaattgttaaccaagcaaaggtcacacaccaccgggcattgatggctcacgcctttaatcccagcactcgagaggcagaggcaggcagatctctgtgagttcgagaccagcctggtctacaacagctagttccaggacagcctctaaagccacagagaaaccatgtctcaaaaaaaaaaaaaaaaagcaaaggtcacacccctcaggaggtcaaataaaagtgacactccatcccctggaaaccataaattctgaacagctaaatcctcagcaagtggttaggccctttgagccacttgcccatgctgcaaaaattttgagtggcttcatcttctgcagttcttaggcaggtaaccacaggtactgtgagttcatgtgcacaacagccaagtcatgcccaatattttacaaaagtccccatcctccaacacttacagctttactaatcttcaaaatagtattttctcttttagttgagtgttgagaaaattttctggcaatgttttattgcatcacactttggttcctcatgaaatatattgccaaatatctatatatcctataactgcttcactgggctaaaatgttccaaactcacaagtcatttcccattagacagtgcttccttttataaattcaggaagggaataaaaatacaaatttgtaagtcacatactgctctttctaaatcacagagaccatggtatgtgcaaagtctagtgcaagttgtgatgaagggactaagattccttttactgctgaagtacatggatttttagagtattagaataataaacattgtatttctttaagtcactgtgaaataaaaaaagaataatgggtaaagcatgcaatgctgtctgcagcttatgaatatggttcaatcaaaccaacacattccaatcctatgtgggagaagttatattcattatcttattctgatcacagctaaaaatgcatggtcacaaaatagtacaagattaatgagaattctttcttcctgcttaagaagcacaggttgttcctaatgggtcaatatccacatcaaatcacacttttttgtacataaattacacagtatcagacatcatgaaacaaacaagactgcaagtgtgccacttccccagaacagaggaaaaattaaatgagaaaagaagacatgtgagcatgaaacaattataaaacataggcagctactaataaatatgcataacagaatatacataatgacggaatgcacagtaagagatttgagacatcatgagctaattatagttgataagagaaatttttcagcatttgcttttagcagaaaataatagaactcaattaactttattttatcatcagtgaattaaataataaaaaaatgtgaattgattattccatttaatattttaaatatctgtgattgcggttgcgcaaaaaaaaaatgggaatcagtctacctcaagatccagcaattcctctcttgggcatatacccaaatattgcatgtccatgcaacaaggacatataagttcaacatgttcatagcagcattgtttgtaatagccagaaagtggaagcaacctaaatgcctctcaactgaagaatggatagagaaaatgtgatacatttatacaatggagtactactcagcagagcaaagcaatggaatcttgaaattcacaggcaaatggatagaactagaagaaaccatcctgagtgaggtatcccagtcacaaaaagacaaacatggtatgtactcattcatatatgaattttagacatagagcaaaggattaccagcctacaatcctcttcaccaaagaaactaggaaacatgaaggactctaagggaaaaatgcatggaccccaggaatgggaaggggcannnnnnnnnnnnnnnnnnnnnnnnnnnnnnnnnnnnnnnnnnnnnnnnnnnnnnnnnnnnnnnnnnnnnnnnnnnnnnnnnnnnnnnnnnnnnnnnnnnnnnnnnnnnnnnnnnnnnnnnnnnnnnnnnnnnnnngggaagaatagaggagagcaggatgagagataccatgttacagggagccattataggtccaaggagagatctggcacaagggagattccagagacctacaaggatgacaaaaactgacaatctggcagtggtggagaggacaacctaaatgcccttcccctataaagaggctgatgactactttttatgccatcctagagccctcatccagtggctgatgaaagcagaggcagacacccacagatatacactgaactgaactctggatcctagttgcagagagggaggaatgaagatcaaaggggtcagtagcaggctggtgaaacccacagaatcagctggcctgtacaagggggggtacatggaccccagactgctatctgggaggacaatacaggctgatgcagacccctaaacatggatgtcaattaggaggcctccgcactctagggggcccctggtagtggattagtaattttccctgttgtaagaagggactttgagagccctttccacatgaagggatgcactcttggcctggacacatgtgggagggcctaggcccggcttacaaaacaaaacaaaaaatatataatctttgcttaatgggaaaaaagaatatataataaaacttaatggtgattttttaaaactagttcctgaacacaaagaaagcatttataatcatggtaagaatggggagtcagccgtgagagaaaaaatacatgggttcttttggatatcaggttcaatacacaattatgcaacaatagtattaaaatgtacttcaacatttcaagaaaaattctggggaatgggtgtcaggcatggtggcacatgctttcctctgtgagtttgaggcccacctcatgtacatagtaagctccaggccaggcagggcaaaacaatgaaaccttgtctcaaaaaaacaaaaatgtctggnnnnnnnnnnnnnnnnnnnnnnnttcagcagttaacacttgctctttttgaagaggacccaagtttagttcccagcgcctacacaacagctcccaatcatatgtaattctagttcaaggagatctgatgtatcctttggcctctactttcaacagacacacactgcacacatatatacatgtaatcaaacattcatatacataaaaaacaaatctttaaaattcatctgtgttaatcaaacataataaatatttaacttttaaaaattctctaaatttgtagagaaacagtcacccacctttgtgaaaataatttctagccaggaagctaattctatgcgccaagataataagaatggaaataagcaaaggagaacataaaactcataggtttatactggaagctttcaataaggagtatctgaggtgcaaagcaagtacaccaacttagaaaggaaagtgagagcataaggaacagaaaccaaatctcaggcatactccagagtaactccatcatataagatatagccctcataattggtaaccacaaaaaatacttttttataagaagaaaaaatctagcaaaatacaatttcactaaggaggctaaagtgacaaattttatattttctaacttttctgagctagttaatgccatttcttgaaaataactgagccttgttttgtcattttaattgatttaaagctaatgtccctttgcaaaataatggtggattgaacattatccactcagaacttcagaatatgactttacttgaaaataggatgtttctagatataaaataaagatcacaatgacatttctagtggatcagagtgggccataagtcatgtccttataaaagacagacaagtggtccaagaataaataatccatggaaagaaaaagcaaaggctggactcaacctgccacaagccagggaaaccaaggagccagaataggcaaaaatgcttcctctaagctctgggaggaagctcagtgaaacttctgtcttctttaactttaagagtctaaatttttaatgttttaaactactgtctttgtggtgattgttgcacaaatcatatgagattaacaggatgattctcagtgatccctaatttcaaggactatttaactgttgcacaatacactgtactcaaagtgatttgtctttgcttgtagtgtttgttttatctgtgtaacttaattcatatactttattatgattcttggtttcttctaatgctggcttcctttttgctgttgcttcattgattttatttacatatttgtttctatccagtaggaagattaatctgttgtttgctgtgttggtttgtttgcttatttgttactttctgagagggcttttaaagctgaaaatatctagagagcaaagttccatggtttacagtgggttttacctggtggaaataggaagtatattccattgtatactatggggtggatgctgacacttcaaaggaataaaatgaatcttctttaatgtacaaagtgttagtaacattaaataactatttcctacagcacttctacacactttatttaaaaatcaatgatactatttactgtgggttctaaatggaggaagacattatcctgtaccttcagaacttatttagtcttgtgataaaaacacaaataccactaacgtaagagtgccatcaggaactatatttcgactgtgatatgaaacataaaatacatccgtgacaaaattattcacaattttaggaaggaaaattgaaatatgtggtgataaataggagacttttgtttctgcctcccttccaatctttgatatagacttggatttacttttgacaccgtcctttccttaatcttttaataattcattcatttcaaatggcattctatgttaagtgtcatcctttccatttcttcatgggagtttatttacttaagagaaatgcagatgctgccctaggatgtcagatacagaactgatgaagatcaagaaatggacatagtatctatctgaagacaaagaattccaaggtgtgaatttttcaactactatctcacttataactcactatggccataaaaatctttatactgagttctccaatatgggagagttaaaacataaaggttccagctacatttctcagacatcacctggaatatatttgtttccatctaccagagatgctctattagaaatctgaactgggcaatacaaagatcatgtagttaacacaaataatttgataattgaagagtcaatgtcaatatttgaagtttaggatgattgtcataaatttgttgtaactgagttaagagaggcttgtgaaacctaactgggttctgttactaccttagaatggctaaggacctgtcttctcaacattcttgctattcttagatgtggtagtttggatgtaattggctcccataacctcacagggagtgagcttcttaggaggtatggttttatttgagtagctgtgaccttcttggagtatgggtgttgggagagggcattgagatctcctatgtataagctactcctaattcagatcactcccagttgcctatgtatcaagatgtagggatttcatccccttatccagcactatgtctgcctgcatgccaccatgtcctgccatgatgataatggactaaacctctgaacagtaattcaccccaactaaatgttttcctttataagggttttcgtggtcatgatatctcttcacagcaatagaaaccctaagacactctgctctgtcctgcagcaggcacccgagcctcagttgagtctgggcactgctctgaccccccccccccccccccccccccccccccccacccccccccccctccccctctacgtgtctgagcctcaggtgagtctgggcgctgctctgccatcccaaccttccccatcaaccccttctcacttctgcctgaacccctcccagacaagagtggactttcccagacaggaaggcccaccctgagtctggacacacctcacccctgtccacactctgccctctgtcctgaggcaggcactggagcctcaggtgagtctgggcactgttctgccccccgcaacctcccccataaactcctgctcacttctgcctgaaccctaccccagacaagagtggaccttcccaaactggaaggcccacccagagtctggacacacctcacccctgtctacactttgccctctgtcctgctgcaggtgcccaaatctcaggtgagtctgggcgctgctctgctccccaacctcccccatcaatccctgcttccttctgcctgagtccactcatagaagagtggacctgacctgaccgggaaggcccaggctgagtcctgacacaccccaccgttgtccacacaccaccctctgccatctggctgccaacagaggctgaacattccgcctgctaccggaaagagagagagaccccacctgcactcactggaagaagggatagaaaaaagacagagtaaaaacacactcaaaaacagaaaaaccaatatgacaccaccagaatctagggactccacaccagctagatctgaaaaacccaccacagaggatgaggaagagatggacatcaaaaattatcttaggaagatgatagagatctataaagagtaaacgagaaaatcccttaaagaaatagaaaaaaaaaaacaagcaaaaattacatgaaatgaaggaaaagccaaaccaaaaaattcaagaagtaaataaatctcttaaagaatctaaagaaagccaagaaaaaacaaccaaacaaatgaaggaagcagtcaaaagagttcaaggcatgaaagctgaaatagacacaataaagaaaacacagaacaaggggatcctggaaatagaaaggctggataaacgatcaggaactaaagatgtgagtataaccaatagaattcaagagatggaagagagaaactcgggtgttgaagactcgctagaggatatacagtgatcgactaaagaaaatctcaagtccaacaaatccctaacacaaaatatccaggaaatacgcgacactgtgaaaagaccaaacctaagaataataggtatagaagaaggtgaagaaatacagctcaaaggtacagaaaacatattcaacaaaattatagaagaaaactttaccaacctaaagaaagacatgccaatggaagtacaagaagaccactttggaaatcagtatggcagttgctcagaaaaatgtgaatcagtctacctcgagatccagaaattcttctcttgggcatttacccaaataatgcatgtccatacaacaagcacatacattcaaccatgttcatagcagcattttttgtaatagccagaacctggaagcccctcaactgaagaatggatagagaaaatgtgatacatttatacaatggagaactactcagcagaaaaaagcaatgggatctttaaattggcaggcaaatggatggaactagaagaaaccattctgagtgaggtaacccagtcacaaaaagacaaacatggtatgtactcatgatggggaatgcactttgtatgtttatcttattgattgttaaataaaatactatttggccaatgagacagcaagtagacaggactagaagtcaaagaggattctgggaaatgtagtagagaagtgctgatacaggcaggaagtgacatggcaaggagactcatatttaagcgaaggagaaacaggaagggctctcttttcccctccgctcctgttccagtggcatgatgtgatccactgacaaggagggatgccaattaggcgtccgataagataagttttataaaatatataggtttatgatagttaagactgaactaacagataacaatcctagtcattggccaagcagcattgaacctaatacaagtttctgtgtattcatttgggcctaactcgggagggcagctggcgtaaagctcacacatggcagtggggctcaggcgacttttggcggaaagatttatcgtaacatactcactcacatatgaattttagacatagagcaaaggattaccagcctacaatctcttcaccaaagaaactaggaaacatgaaggactctaagggaaaaacgcatggaccccagagaatgggaaggggcaggatctcctgaggagacagagctgccagaatgagaggaggagaagaagagaggagaggaggaaatcgaggagcagaaatattgagttgggggaagaatagaggagagcaggatgagagataccatgttacagggagccattataggtccaaggagagatctggcactagggagatttccagagacttacaaggatgacacgaactaacaaactaggcaacggtggagaggataacctaaaggatgcccttcccctataatgagactgatgactactttttatgccttcctagagccctcatccagtggctgatggaagcagaggaagacacccacagctatatactgaactgaactctggaacttagttgcagagagggaggaatgaagatcaaatgggtcagtagcaggctggtgaaacccacagaatcagctggcctgaacaaaggggagcacatggaccccagactgctgtatgggaggacagtacagaactgatccagacccctgaacacggatgtcaatcaggtggcctctgcactctagggggcccctggtagtggattagtatttttccctggtataagaagggactttgagagcccatcccacatgaaaagatgcactcttggcctggacatatgggagacccaggatgatgtggtggactttggggagcccctgtagagggccctaaactgcctggggaggggagggtggatagggtgggggacaggtggcggggggagagaagaaagaggggagggagagggagaagggattgagatgtgaagaaagcttgttccgaatttgaactaataaaaaattaattacaaaaaaggtgacaaatctggacattgggtgaaaaactgccctcaacatcacccactgccaggactgcccagaatgtggacaagcaggacactgaggagttgaatgacatgctctgcctaaacaaagcaggcatgtccccacccgaagttcctcctactccacaggaaagtgtattggatcctgtagacctggcagttaaaggctgatgctgtcctgggacctcttccccccaataatcacagaggaacctaggttactgtccaggcaactggccagtctttgtcatttattttttcatttattttatatattttttaaattttttattagcgcctcaggtgaatctgggcactgctctgaccccccctccctgcatcctgccccatcaacccctgctcgcttatacctgaacccccctcctaggcaagagtggacctgctcaaaccggaaggcccaccctgagtctagacacacctcacccctgtctacactctgtcctgcagcagaagcctgagactcaggtgagtctggtagctgttctgccccccccaaggtctcctatcaacccctgctcgcttctgcctgaaccacccgcccccagacaagagtagacctgcccagaccggaaggcccacccctgcttgctttggtcttttttttttttttctttttttttgtttttcgagacagggtttctctgtggctttggaggctgtcctggaactcgctcttgtagaccaggctggtctcgaactcacagagatccgcctgcctctgcctcccaagtgctgggactaaaggcgtgcgccaccaccgcctggcgtgtctctgtcatttttaatagatcccggaactgcttggtctgtacttcctattaggtgaaattcttccttctcagatctcaaatagtgttaatgacaatgctagtatcagccttgtgagtttaacagcagcaaccaaggcttcatctgccttttcagttctcttcatgtgtaaaaatcaggcttcaggccttactcccctagagctactactaggtctaggcacagtttaccttgttaccagactcagaaaaaaaaatttttttaaggtgatttaaatacttaaaaagtgaaaaatgctttagatttctttcccttgctatgctactgcaatattaagtttcaggaattcagaattttaacattaatcaatggagttctgtttccccacctgcctatttctgtgggtgagatctcttccccttcccctgtccttgggattcccctcccccagctaagaggaccatgggccaagaaatatcaattgtacacctaaggaaaaaaattccctctaaacttaactctaccttctgcccctaatatatctgttccagaagatttccaaccaaagatggcaaagtgctctaaatgatgcttgcactttcctaaccccagaagtcccccagagtccagagaagtgaaacagcttcccagacttggccagcattccagctttttgggtcctcaacaacaatgccccagtgtcaacaggaactaggcacaaatgattatggccccctttagtatcaacaaaaggtaggggtgttacgtttcaaaactggaacaaatgactgaggtacctatttacatatagaagccaacctggccaccaggctctcccagtatccctcagttcctaccaggttatggctggcatgtccatcccctaccctaaactttccagcctagggaacagactgtccttcccccagaggctctgccctgcataatcaagacattttgattaccagtcctttatacctttggcctcatggctgctgcacatggtttctgcccccacaccccttcccccaagtagcccagcccagtctggttcttgtccactctggacttacccagacatccctgcctctgactatcctctcctacatctctacaatgaactttctcctccaccatacctaggagcagccatgtcctttcctttttatttcctttaatttcgggagtatctagaaagagataggggaggaatattgaagggctcttgaaggcacagaatgtttaaatgtcaccaacaggttttgccttttactcttctccacattccctctactttgctgtttttttatccctctgagtcaaattaatctcttttgtcctgagaacttggtcttggggtgtcttgtgacaatttcagggttctttcatgtatgactaaaattaattagctagatttatcaaagaacaaaatattatttaaaaaataccacttataggatctggagagatgttgcagcagttaagaacactgttcttgcagagagtccaagttcagtttccagcacccacacagtggttcacaaacatctgccactccagtcaggatatatgatgccctcttctgatctccaagggcaccaggcatgcacgagatacacaaacacccatccaggtaaaacactcacgtgaataaaataaatatcttttaaaacgttaaaaaaataaaaattttaaatagcatttatattttatgtgcttctgaggagagtaaacactgaatcacaagatcttctgcaagatttttcagtaattattttaaggactgatcatgaaaggccatcactttctgactattttcctgaaaacagattactgactgctaaatagcaaaactatgttataggtttttgtcaccttttaatgaatgaagaggatcaatattcttttctacctatctgaacacacataggcaaacccatctattactagaaaaatattgttctttcctgtaatttaaccaaacaagtaatttgaaatacaccattttattgtatgcataatggagggcttaatgatcagtgacttaaaggcctctcatatttaatataaccaactcaaaaatgagttagtactagtaagatataatgattggtattaaaaataaaacaaaaatttatacttcataatagaagcttataacacttaaaaacattaaacttacaacattttctaataaatttggggaaaaatcacacaggaaacttaaaatttctttgcaaagctttaatggaacaatttagttaatttctgttacaactcattaagtcttctgtttctagaactgttataaagcttatctctaaacaaaacaacctgttttaccctagagtagaccatcgcagcagtgttggtattgcaccaccatgagaaaaacatagtctggcacccacatacaatacaagaaaagtaaactaatttaatagaaaaagcaaaaccactgaaatcacatgttaaaagtaattatttgaagatgactcaaaaaaagagtgaattgattaaataagtagtcaaatattgtgttttaagtaaataaatcaatgttaatcaaatcaaattactcaaacaattgacctaatatttgaaatcataacaatttccagtaaagctgtatttcttgtaatatatttaggaaaaattagcatagctaagattaattaacacagggaatataattctaatttggacacattttttccattataaatccatccaagggaataattttggaaagaaactgtactgagtccagttattgggtctaacacttcaaatctcttcagaaaaccaacaagttcaatggagttagaaatagcacattgctaacaggtggcgctgagaacttcggtcagtttcatctgcttttgcaatttggggagagtttttttgttgttgttttatttctttttgttttgttttttgttttttgtatttcattgttgtcattcgaaacaaatggtatttcctaaaagtctgaacagtagaacaaaaacatcttcagaaaccgcaaaatcagttatttgcctcagcctgaaattttaaggtactcactatccgaggtggcagagatgcgttgtgtggaaatcagatgctcgatagcttgagtgacagcttcatcggtaagtgcatggaggtctcttcgcagctcactaatagccttcccttcctggtgaggacattcttgaatcagacgcagcacctccaaatggatgaaattaagactagctgccttagcaaccctggcggcggctgctcgggctcgggcttcttccaagaggtgccttcctgtggacacaccttcacgactttgatccagcatcatgtgggcattgacgacctccaaggtgtgtgtggacagctcattcatatcttccaggacacggatgcttagaaccccaagccgtctggttccctccgaggactggaggacaccaagcactttggcatacacgccaactggcaggggaatcacacattgcctgaccctctcgcgcgacaggggctgcctggcctcgatggcctttgcggtcatgtcatcaatcttgtacatcatgtaccgcgaagctttcttggcctccatgatcatccccacgatagagacccggtgaagtgcaaagcccctgatcttaaacacgttgtcaacctcaacagcagtaagcaactggcttatgcagcaaggcacaatgctgtgaatgccaggcctggtcaaggtggtcatgggaagacccaggtcctgacctccagcttgctcatcactgccgcttgccctgttagccccatcatcatcaacaaagctatcattactcccaaacccactcttactcatcatcttttgaagtcttggcaggatttgatggctcgacagcaagaggtgttcgctcacaggctgcacagaaactcgcttgtcgacggtctctcgaatctcagcaagatggcacctccaacctcggactagagctaatgcagaatgccaacgcctcaagaccttactgaacagccaatcagctaccagatgaggacccaacattctcgcgagattacaaagccctcctccgcatgtttttggttgctatgcagaattctaaaaatagaaagagtgcaaactgtccagccactgtaatacatacactcgcgagatttgaggatggaggatctccaagagcttgatgcccacctggttcacacagttcgagaacagcctgagctaaactacacagggggaccttgcctcaaaataaaatatatatatatgtatatatatatatacatatatatatatatgttcttttcccccccaagtatgtaatatcaagcactgtctgctatctttataaagttgcatttgaagtagggaaaatatgtactacgcactccattattgaatgccacaattgggaggggggttctgttttatttttattcctgtgtgtgtgtgtgtgtgtgtgtgtgtgtgtgtgtgtgtnnnnnnnnnnnnnnnnnnnnnnnnnnnnntgtgtgtgtgtgtgtgtgtgtgtgtgtgtgtgtgtgtgcatctgtacagatatgtgcccaaaatcccagaggacagttagggtcatatccatacctggctgtggtggcttagcactgcggaggccacagcagaagggttacttaacattcaaacacagcctgaaagatgttgttagttccaggctggcctggcctacaaatttgagatggtacaaaataaaaaaataatagagatctcaaatcttttcgtgagatcactaaatcttaaaagcatgccattttagaaatagcaagatagcaacaactaaaaaatgcttctaacctaaagcaagtcacatcttaacactgtctttattatgaaattataactttcaaattttatcaaaaatatgactctaaataacaaatatatcgaatttatacctgattccacctaaatgactgagatttaaattattttcagtgctttatgaactagatatcagtctgaaaaatataagggaaacactaataaaattacattgtctttatatactcattttagtaaattctgaactcaaaacggtgataatttagcatgtagatcacagaatgattcaatattacattgaaatctatttttttcataagacattatttgggatattactaattttaaagcctgttattgtcaataaagaattattattcaaacccattgctatcaaaaacttgcctctttataaacatctgtaagatagtttaatgaatgtataaaatagtaaggaattaattaatagtctccatttctttatttgtttaaaagtagtttgagctatctcaaagttacaaaaatgtgtgtgtatgtttgtgtgtaacgtggtctatgtaaaatttaaatataatatgaaattatatacatacgtataatcacaagtgtaaaaggaataaaattttaaaccaatgtaattaatgtgtttcgcaaatatataacaattttcttggtaaacaaatagactaatatgcaaatgtaaatatttagcttctagatttaactccttctcaaaaaggaaataactattaaacaattacctatattttaaaatcatacatgagtaaagatcaaaatagctaaacagatgtttttaaacatttagaacttgataatcagacaatgctcttctattagatgataatacacttctgaacagaaaaatcatgaggttaaagtaacatatctgattatacgaaatatctatatacaatacaaaatgtatgaatcctataaaaatgataagaactgcctacctgacaggattgctggttaaggaaaccctcagagattccagacagttgagaagtttctcatctgagatacctgatttcaattcatgaacatattcttgtgaagacagggtgcattcatgcttgctgtttttcaggccaccctatcaaacaaatagaacatgtcattttaaagaggtgtcaagggttttttttttaaatcttgcaagtaaaacatagactatattaataacattatgacatttttcaaacaaagtatgtttcaataatcttttctcctaagcaacattaaaatctaatgctttgaataccaatttaaaaaattaaaggaattttaattacaagaataaagattatatcaatattttactttgtgtgagtgctatgccacctcactcttttgtttcaatactctacctccatgttaaattcccagaccaacaattcttcaaagacctgagtgggaagactattgtgtaggatacattctcctcagccctttaaaagagaattatactagctggtgttcacagactgaaaagaaacctgatgtgagtagcaaaaagtattattgacagggttatttaaacttatattccaagtattaggatttatgctaactgtttccctcaattcaaaatataaacattgttagatcatcttattaattttgtagttgacagttaacatttatattcagttatatgtaccacagaaaataatatttttttggttttttgagacagggtttctctgtatagctttggagcctatactggcacttgctcaggagactaggctggccttgaactcacagagatctgcctacctctgcctcccaaaatcaaatcttttaacattctcattataggaataaagaagtcagcggagtattgtgatgcacctcccataccagcccttgggaagcagaggcatgtggatctctgagttcaaggccagcctggtttacatagtaagttctaagacagccaagactacacattaaaacaggtagattctggggaataggtaacggcataattagtgaggtttcagaactaaattataaatattttgaacttccaatgattcatttatccgttctatgccactttccccaatgttgaataaaaaattgaagcaacaggaatataagtctgaaatttctatttgaaaaatgtcaaagtgtgtatcttcagcataatcaatatggcacaacatagtattaaagaaataaccctgaaacaaaacagtgtgatagattaaactaaatctcactgtacttaatagagctgtaatacaagaacggcttattattaacatccggatctgatactgaacaaaggcaacaactagataatagatggataataattgaaattttaattagctgctctgtatgagattaatgaaaattaccactgtgcccatttgatctttaaaaagtaatgcagacaaagttagtaattagagtacaacatgctattccaaagctaggtgaataaaaaggtttcctaatttgaagccattccttaatttgaaaatcattagaatgtagaaacttgtccgtatgactatgcttatattatcctaagtcagtacacagaaaactaaaatgtacttttggtaacatccccctttactctaaaataaacttttaatatcaatactagacaagaaatattttaaaaagaatgttctaagtctgcagtgaaaatgacaaactaataagtttagttacttggaccaatctttttttttattattagaaagaaaattattttacatgtcaatcccaggtccctctccctcccctcctcgcctgccctgccaactaatgcactatccatcccataccttttatttagtttttaatgtaaaaacgaattgacttttaatttgagaaaagcctacagaattcttagttggaaacataacatgctgtgaacactggctggaaccattgattgtacatagctctttcagccatggtttgcacacagatagcaattactgtccgtgggtccacctttagagagggcaatattatcctgaaaaatggcaatactgctattgcttgtattggctaaattttttcaacatgatataatctgtagtcacctgagaagagagaacctcatgtaagggacccttctatcagactgtcctgtaggcatgtctgtggtcattttcttgattgatgtggtaggacctagttgacttgaagtagtacatctcctgaacagatggtactagaaagcaagtagagcagccatggggagtaagccagtaaattggaatccctctatgctctctgcttcagttccttcccacaggttcctgccgtcatctcccttcatgatagactttgatagggatgtgaaagctttaccaaaatttattatatagaggcgatcctattaagaaatagaagtttaatattttccctatatgttttatcattttacatctccaactacaatattaacttcaaacaatgtaacaaaacaagtttaataaatgttgttgttgattataaatgtttcctgcagcctacataaaaattacattttaagtaggtaatgaagctataaattggaaaggaaataaagaaaaatgtcttccatgagacaagaagtgatcccattatttccaacctgtaactttccaagcatttgagtaagtgctgtcaaaatgattgcactgaatactactcagttccttgtgtaactgctgacaggaagtaaagtatcaacaaagcgtgtaaaggatgagtaaatgagaactgaaagaactgattgattgtcatgaaaaataaacatatgcatgcctttcatactaattgagattgaaggacttagtcatcaatggtaccttacatgcttatagcacaaagagctttcactaaccttcctatagaaatacaccacttcatttgagcctagcaactaggcaaaatattgcttaaaaatgcatctgacaatcttgggggggggctaaattatttacaatgatgtactataccaaagggaagggaacaaacatttcctcactatactttacccttattagccatgtgaaactggtccgtttgtcattttaatcctggaccttaggttcctgttctacaaaacaaaaatattatggtgtctatctgtaggcttgttagagtaatataataatcttggtaaagaagaattatctggttgttccagttggcttttctgttgctgtgatagaacaaccaacctaaccaaacgcaactttggaatgaaaagatttatttttagcttatgacagtctgatcatgctccatcatagagggaagcaagggcaggaaatcaaggcaggatctttacccagaaaccacagaggatcactgttatctgcctttttctctagttatgctcagctagcattcttgtatagcacagacccacctgagtggtgattgtgttacctccccaacatcaatctatcaagacaaactctcacaggtttggtcaaacatgaatctgatccaggcaaatcttcaactggctttccctctccccagctgactatggttgtttcaagtcgacaataaaaaactaaccaggacacttatatacagtaatcattgaattagtatatacttacatgacatgttattttgtcgttaatttcatggtttcatgaatgcccaaacagttaacttatgaaacattatcattggcataaatattatcagcttctgatcaactatatggttgaagtagaggcaggattctaatcttcctgaaatattcaggaatggacctgtatcacaggtaagagattagaagtatattttgagaatccacaggaatccttgactggctgaggagggaatgtgaaaaagagagggctaactgggaaagtctgtcttttgttcccctaataatgagatcatttacatatttatattctgctgaagatttctaccagcaaagcaagtctcatgctaaataaaataaagttttaagcacactgggccacacaatctcaaaggcccagctaatttgaatgtgtgattcatagcatgtaaattagaacaggaattttgttttttttttgtgaaataagttgagttgattaccttactctctactggtgcattaaacgcaggtttccaatgtgttcattaaacaacaacatgaacataaagtatctgctatggggcattgggagtcagtccttcttatattagaatattaccacttgcatggagtatattctcaggtatggcaaacagtaagaagctgagacacaatgatgtcataacagagctcacattctgctatgtaatgagcagaaagattatcatagtatgtggtagaggatgagaccttaaagaatcaatgaatctatttgagggatgaagttcaaagactaataaatgctattcatgtaaggcagactaagctattttggtcagaagttaatcacagagatacaaaaactcaaacacagcatgtttggagatttgctagtacatcaatgaaactggaactctgggctaataactctcaaactagaattcttgaacatattttaatggttcctgctgtgggtaaggtaattttaaaactccaaagttccttttcttaagatgacagcattaagcattaactgaattacttggctaaccaccttctaaccaaatccagccacctaatctctgtttttatatctgtatcaaagaaaatacttttccaggaaagtgaaatattcattattgaatcctgatgaaataaccttagtatgaaaaagtatttgtaccaaaataaacaacaaatgacatcaccacatgttgcctgtactcattaaaatttaactgcagatgacacaggaaacacaggtggcaccactggggtcatcctatatggcactgtatgcacagagattatcaaaaatattaagtgttaaaagtgtaaagaaagggaccaatgtacactgtggtcagaatataattgtacatcaattatgaaaattagtatggaagagcacaaaaaagtaaaaataggactgtcatatgattcagcagtccatatctccaatggctatccatatgccaatgatatatctgtactcatatacttactacagcattattcactttataaccaggttaaagaggcaaactattcattatggatcaaattctttaaaattttcatacacacaatagaatgttacattgagatatgaaaggaggaaattctataaattgcagtaatgtggaagagaaaatgattatgcatgcacagagagacaaaatttgcatgatctcctttacgtatataatataaagctatttgatagagattgagagtaggatgtgagttaccacaggctaaggtacttgggagtgagggattggagagatattaattaaatataatacatgtctacagagagacagggggagtaggttcaagaaatctactgtaggacatggtcaactacagtttagaatatatctttgagaaattctaggagatctgtgtttttactacaataactgtgagttaatgcatttgtaaattagctacatttaatcacatgtgttgcaggacatcataatgtacactatgaatacacaacatttttatatgctgatgtaaaaaaaaacaaatgaacttgaggacaagcatggagacacattcctttgatacctgcactcaggaggcagaggcagacagatctctatgaatttgaagttacagtggtctacatagtcatgtcaaggccacctaggtttacataatgagattgtgcctcaaaactagatagatagatagatagatagatagatagatagatagatagacagacagacagacagacagacagacagacagatagatagttcgttcatgggtttaagagcatttgctgtcatttcagagacctggcttcagttcttggaagtcacataacagttctaactctagttccaagggatccaatgccttcctctgccttccatgggaaccaggcattcatgtagtgcacatacataaatgcaggcaaacacacaaatatatccaataaaaagaacccttttgtctaaattaaataaatgaataaatctgaaagcaagaatctgtaagtaggacatacattgagaaacaacgggggtaaagacagagcaaaaggtatttcatgagtaggcaatagtgaatacatgtgtagaggagggcactttcatttccctgggtgcaactgactactcagttttctctgtatgtgagctgatctctcaaaacattactacactgtaaaatgtgggactaactcagaatacaatcaactggtccctaaatgcccaggttaaattaaataaatgggcattaatagtggcataatgttctcactagtgtttaaaagaagcagacttatttaggttagcatatgtaaattttaagaatatgtagaaaatgggtctttaggcttcatttcagtaaactgaatttacttaacacattcaaacatttgtatttattccctagagaagtaaggaatttagaagttcttcaagcttctgagataaataattcatccctattgcatgagaaccaattaaacttctcaactagtactcaatgagtatcacaaaaacctgcttgcctcaaatctcaacctgacttgaaagaatgacctagtaagaatactgaactagtaattaagcataaaagctttgtagtttttataatgttctcacccataaatggtatagatgttagagtaagacaaatatgtcaacataaacagcagtgtagcattgccaatataatggaattagttttatagattaccaaccatgtctttctgcttttagcattgttacatctaaacatgtctactgtggatctgaacataagacaacacagtctcatttcctcaaaataataatagaactaatatttcataggtcacattctattaattatgccttagtgtgtctttttcaaagacaaaattaaggtaatctaaaacacaacaaatgcatatacattcttaaaagactttttctactatgtaaagatatggaagttaagtatcttcaataatttatacatataaactctttataaattacttcagaaagtgatagaagttcaaacttatcaaatatttgctatgcatcttatattttaagtggatgtttacactatagaaaatgtaaaaaaatatatactgcccaaatctgacatcagttaaactgttctgctgccattaccatatactttaaatataacaagacaagaaaaaatagtagaacatctgaagcacagtaggttaatgcactatcctgacatttctaaccagccttctttctaaccagccttctttcaaattcatggcatctttcccttaaactgtgtgtgtgtgtgtgtgtgtgtgtgtgtgtgtgtgtgtgtgtgtgtttgtgtgtgtgtgatatgtcatgcaccctaaatgtagaaacacaactcacacagtctgcataatgttacatatatataatgttttacacacacacacacacacacacacacacacacacacaaacacacacacacacacacacacacatgttttcaggtatgactatttggtattggacaatcaattggtgtgctcttctccggggtagactattgttcccattagaatgctcatttactgaaacataaagatttcaataaggagatccatttttgagatgtattttaaaattactaaatttacagatgcacatcttccagctaatttgtagcaattcaaacaaaatgctatgcatcattactgctaaatatgccaacaagttttttcaactaatctaaaacattgcaaaccattcactggaaacactatttcataaaatgttaaaaattgacataatttaacaaaaaacaaagggacagtatgtgagattaaagcaaattataaaaggtgaaatactattctttctccagaaaattactacttgtgtaatttatgcaaagcacaagtcttggtccacaaaagagaaccaatctaatgtactgaatacgtactaatacggcttctatgccaaaatttgaggagtaaacaacagtaaatgtcctgaatccttatgaaaataccttgtacatataagagatgattcatttataatgatttcaaagaagctctcaactcttatgacacattcattttcatggcagcaaatagcacttatgtattgcttttatttttttatctcagcgagtgaagttatttgccaaataaatattcctaaggatcatctatgagctaaatgctgggtaaatgaagataagaaggacacacatcataattttcaagaggctaagaacattatttgcccgtcatttgtatatttgttcattaccttggctttggtattttgataccagggctccttctatataccatgctgacctacaactcacaaatcttcctttctcagttcctcaagcgctgggataacaaacacaaactatcacccctgttgagaatgacattttcccaataaagttaatcatcatagataaaaaagtgagaacttgccgatattttgtgaagttttttttttacaattaattcaagtaataaggttaatttatttttgccattgctccactgcccctattttccaatggaaatagagcaaatcataaaggcaaacactttagtattatttttaaatgccatggtaacacatagttaattttttaaatacctgctggtccttctcaaaatataatataatatgtaagaaattgaatacttgtaaagtaagaggactaaaacagaagctaatagttcataacttaaatataggtctttgatgtatttgcacaaaaaaggcaacaaatgtatcgggttattattaaactatggaataaaagttatggcattataatatttgctaacattcaaatttcagatagaatttagatcatgtcccttatataagaactgtcttaaaaaacaaaaatgtattatctttaaaaattctcattattcccagtagctttccagtaatataagatgtattagccccattttacatatttaacaaattctttaatcagattttgcaataatacacagaaacataggaagctgagaatggaacctggggcattcaatttctaatccagtgtcctatccattagacttttaactctgatatctttggtacttttcattatcctaaaaggcacttgaagctcacttattcttgaaaggagtgagttagctgtcaaaaacacaaaggttcagaacttacacagcaactttttagtttggaaaaatagcacatttattgttattagtagtaacaaaatatggtaaattatcacagagaaatatacctacacacacacacacacacacagagagagagagagagagagagagagagagagagagagagagagagagagagattccacatgtaaaaaagtctacattttgtactaactgccttcaatataagttacataagaattaattgtgtagattaaaatagttgatacatagaagggcatagtgttgtacacatttatttatgttacttgggagggagaggcaagcgatctttgttggcttcaggacagcccggtctacacagtgagttcaagttcagccagggttaaacagggagactcagtttcaaaagaaaacaaaacaagcaaacaacaaaaaagccaaatttttatacttgaggatacacagaattccagaaacttacatacatgtgtgggtataaggtgaaaataaaacaggtaacaagtgaaagaataaaatgagtaacaacataagacacaagatagtacagcaaaatatagaaaagaaaaaaagaatggtgggaaaaagaaagaaagatagaaagaaatgaaagaaagaaaggaaggaaggaaggaaggaaggaaggaaggaaggaaggaaggaaaagaagacatgtttttcaattaaaatcaggtacaatctgttgacttcttcaaacaataaagatttcaaaccctttaatcctaaccactgagagaagagatgctaaattttggaaatattttaccatgtaaaatcatcagacaaagagggaggattgcaatgcttatctattttgcattattttatgtccttaacaaaaagcatagtttatgctgtaattatatatttaaaattaatctactagactttttactttcatttttacatgaatgtatacactctttagtatatgtgtatatatttgtgtattagttttcatgtattattttattagcattttattatttcttcattaaaaatgttaaccttggttctctcaatggcattccatattcttgtatgttaccacttttcatatataagaaaattttgttaaattcaataattgaaataaaatggccacattgctatagttacaactggaaaaatttagagaaattgtaaatatctatagtctatctcatctcttctaaaattgtactctgttcatcagtgtatttcttcagctttcataatgcatgaaattcatatagatttataaatctctacttatttcctctgatcaatttgtatcttgctaacattattaatgtgctcttttcactgttctgcaacacattactgttggaaagaaatgccatcggtaccttctcatttcattaatgaacatgtaggtatacagctgtctattgattttatcctcctaactttcagaattatcaccttcagctgaaaaaaattagaaaaaaaattgagcnnnnnnnnnnnnnnnnnnnnnnnnnnnnctgaaatgtttttttttttttcttggttgttagaattaaccttcatacggaaacagaaattgaagtatcagtgacactgcagttgtatgtttcattttggtaataaatctcaatagctataggtgtctctgccaggcactagtccctacatagtttgtccaatcccaagtggtcatccttgaacacatgcacatatgagctacatgtactcggtagattgtgtgtgtgtgtgtgtgtgtgtgtgtgtgtgtgtgtgtgtgtttaagattagtatttttggtatcaatgaaatacattaaaattttcctgagacatcttacatacatagtgggaaatattttagaaatgaaatataaatgtattttaactgtctcaatagataatatgtctagaaattgctttggaactttcactactacaatgaaactagtctattattttgtgcaagcagtacttggagcttctcaacattcttgtaaataggtagctgattattattctggagtgttcacctccttgctgtaagcatgaaataatttacagctgtaaatgatgtaaaagaacttgcagaagtttcaacaagttctatagcatatgctctcaaagagcattcgcattatactcatgtacaatgcatccgaaatgaaatagcaaggcaagtctcttcaatctcgccttaatttaaaaacaaaaccaaaccaaaacaatcctgaattcaaaaggatatgtgcagcttccagttcattgtctcgtgacaatgcgcatacctttcatttcactggaaatattgaaaattcaaatacaaagactcttgtttttgtttctcatggctattgccccaatgctgcacaccagagagatgcatactagcagaaagaatgagtagcagctacaggcagttttggaaaagcagaaagcttattatgcattcccctctctgcatcttaacacgttcttgtctttcacttaacattaagaagaataaataattaattattctgaagtatataaatccaactagtgaagactctactacttaaacactaccataaactttaaagacatgtcatcatagttaaataagcactagagtaaaaggaaacatcttgaattctatttttaaatgttctgaaacacacattgtactttggtgcatattaggtgaatattatgaaagaaacactgaattctgaatgagtgggatcaacatattagacactgagtctctgctagtggcttattaaaggacaagtgggagtaggtatctcatgaaaggactttttgaaataggcaaaatgattccaaatatcttnnnnnnnnnnnnnnnnnnnnnnnnnnnnnnnnnnnnnnnnnnnnnnnnnnnnatggatttgcttttgttctatatttgtttttcatcagtctgcccatttgcttgttgtgtttctttcccaacataccagttgcagacagtctgcatctgtgtgttatttccaaaccatttaaaaaaatctagattaaggttaatttgtagacatgttctaaaattgtcgtatttcaagtatttccatggtgttctaaagcttgtaatgtttgaacaatttaaatccttagctctgatttttatctcccttctcagattcttcacatatatttttaaaacattaagctctaatttgcccacactgaaaaaatttttgtactttctttacttgtctaatctttactcatcattaaagattcagcttaaatatcacttcctcagggaagccttccctgtcctcccaaatgagttctctataatctcctggatgtctcctttaagcacttaggataattaaaatgaatattggtttatatctgactccctatcatcctgagaacaaagactaaccattcttattttgagcagtctgttcatccaatattcaataaaatacatacttggtaaatgaatatacgaaaatttattctgtttcaatatgcaacatatttatttatagcagagaaagccacatagcccttgttgtcatatgttacaaaacatgacacaagcctaatttgaagaatattaaaatggaaatattttgaggttttaaagccaaagttagagccttagctatcagttcaaatttggataaaacatgttccatcatgagtttaattacattatagtttcactaactgattaaatgagaaaataagtcatgctctaccagcatttcagagaaaagctgaggaaaaaataaaaattctaattatctgagaaagctatcttaaacagtggcgagaaagactaataaaaacacatggaagaaatttaaaatacagactaaaacataaatgaggttcataatttcagagttaagaaacccagatttaaagaaacaaaagctgctattaagtagtcacttcatacctcctttttacctaggtaggctaaaaacatgattgtattctaagcctgccagttggttgtttcagactttcatctttttgtttttttaactaaaaacattccatttcaagtttgccacataaaatccataacacaacaagcttggctagacaaggcaaataaggtttgaggggtttttgtgtgtttttatgcattttgtacattttacctcatttcctttaactggttaaaagatgaatgaggctatttgggttttttgttgttggttgtggtttctatacctatcctttgtgcaatgttattagaatctccaatttgtgatgaagagaaagtatctattaccagtggaaagtcttagctgtggattaaaatgagtaagagcatagggctaaacagaattttatcaatactgtttcgcctattattttcatatatcacataaggtgacacaagtaacgtattcattcttgtataccactatgcaagctgaagtttctcataatcattttaaaagcacaatttttcaacttcaaaaataaatctatggagctagaacagaaatctttactaagttgtcaaaagtaagcactaaacatttaaatctagaatatgtgaagtatcatatgtgtgaatgacttatcctattaaacatcacaaagcagaagagctttcaaaataaagaaccaagaaaatgctatattcttaattgcaattaaacaagcctcaatggcatacatacttagagaaatagcaaaaataaatgtttcatgacaggctgagtagtagtaggttcataatactgaagaaagttttacagttatttctggaaagtgaaatcctacaatagagagtagtaagacttggatgttaatggggtaaagtatctttggaatgaatatacatgaataaattaatgggaaatggcaaattctctaacaatagttccaatgtgataattgggagaaaaactctatagtccttataggcctgctaagtttatgaactgtgttggtttgaataagaatggccccataagctcatatatttgaatgcttaggggtggcactatttgaaaggtttaggacatgtggcattattagagtaggtgtggccttattggaggaaatatgtcagtcaggggtgggctttcagtttcaaaaacccaagccagtctcagtctctctgtctgtgtctctgtctctctctctgtctctgtctctctctgtctctctctctgtctctctctctctctgtctctgtctctctctgtctctctctctctctctatctctctctccctctctctcctgcctgaagatccagacgaagaactcttaggttgttatccagcaccatgtctgcctgtgtgctgccatgcttctcaacataacaatactggactaaacatccaaaactataagcaactgtcatttcacagtaatagaacactgtctaaaatgaaaaaaactaaaaaaaatacctaaaatcaagcttgatgatggacaagagtatagattatgacttgttattatgtaatactctaatatataaaataaatactctaatattacaatttaagcttataacaagttaatttgtgtctataataacgcctatttagattttcctataacaattacttataaaaactgttccaaaaccaggtaaggtggcacccacctttaataccagcactcaggaggcagagacatgggaatctctcggagattgagggcagcctggtctaaaactcaagttccaggacagccagtgctgttacacagagaaaccatgtcttgaaaaataaacaaaccttccaagtgtaagaaaaatataaatgcatgagccatcagcaaattacctacagtactgtttcatcgtcattcttaccttctcaaaccttaaaagtataaaaactaaaataattcaagtaaaatgaatgtattcaggatgccttactggaaatacaaaggctaacagacaaagtactttaataaaatcttgttacacacaaaaaatccaaaaagtacttgatggggaatgtctttctgtgtatgtttatatccttattggttgttgaataaagtactgttggccaatgaagaagagagttaggcaggactaggactcaaagaggattttgggaaatgtagtaactactcttcctcctgctctcttctctgctctagagacaccacgtgatccgccgccaagagagggcacttactaccggcgtcctccataagataagtcttatgattatggttgataattaagactgagctagcagataagaaatcctgatcattggcctgcagcattgtaccctacaagtctctgtgtgttgttttgggggtcctatccggtggctaggctcagtcagcatggtgtaaagactttacaagtactttaataaaaaacttgacccctctttatcttttgcacaagacaacactggtcatccatgggtttttcgatgtgaacaattaattaaagcaagctttttttaaaaaacctaatatctgttactggcaaaactgcatcttccatttgcattggaactcctgtgcagtcaaaactctccaggaacagttacagaaatgtcaatttatcaaacacataattcactagaggataatgaaccaaatgtagtacttgtatcaggaatgatttagggatgacgtaaagcacattcaatgaaactatattggatgtgttggcagaaaaaaaaatgaaaatggtgaggagtcagatctctaggcatttggagattctctcccaacctacttctagacttaatccatcagaatttctattctttaggagaaacaactcaggcaagtatgttaactttcctctctacctttctcacaacagagctcacttagaatcccagttccctacagctgtacaaggaacaattttgatagaaagaaaatgtttcccaatcatgtcaagaagatgagacaactcaaagttcatagaagctctgagaaacccctaaaagtaatagattcaacatcatttctgtaatctgatcatgaatatatactcaaaaagtcacttaactacaagacaaacacttcttaaaacaattctagtaagattaatggatcggtcacatgaagttaaggaatggattccagaaattatacctagacgagatcacctaggcagctatgtaatctggagaaaattgcttaaattctcccttctttggtttagagaaaacaccttctttggaatgttctgacaagtaaattaagcaaaacaattagaacaatgtttatttcatagtaaatgagcatcaaaagtaactactattattattatctaactaaacttttgtaaactgtatctgttaataaatatgatggcacatttttctaagatagaagatcaaactgatggaagtgtattatgtaacattataatactactatatatactaattatacaacataacaatactatatataatatataatactaatacatttaatagtaatataatgtaatataaaacattaaaagtatttgatccagttggatatattacttattacacaagaagaatcttgttaaaaattagtaaatacaaactccaataatgaaattaacacaaaatccctaggtacagtttttttctgtgttatttcactggaagagctgaagtagaaaatgagaaaatgtcatatatgagttcatgatgtataacattattttataaagagattttctggttatttgatagatgtgttttaatcacacctctgtgtggatatgtgcagatattgcaagtgcctgtgaagaccagtagagggaatcagataccttagatctggagttacaggaagatgtgagccacctgatgtgggtgatggaaccaaaggaccttttggggagcaagtattcttgatttctgagctatccctccattttgtaaagaaatattctgcatttgtatgtgtgtcccgggcactaaaagaatacttaaatatcaagcaatagaaatgttattgtattctcttggataattgtgtgttctaagtgaaagtagtacagactcagacagtttggggcagtagttaactttcaatccaaaagtattccaacgctgtggtaacttcaccatatattaacaaaaatttttaccaaatatctgtacttctttcaaaaactaacaggtaagtaaatagagacagtggataaatgagagtaggggggaaagcatcgtgtttaaaggaaatactgaagaagaaaataagatagcaccactaagtgtaggctcactctattacataaaatatgcatctcagaggaaatcccctacaggtgagaaacctaggagaataacaatcatgctttaaaaaattaaagatcttttaaaattcctttaaaaggacaagatttcctgagcaaattgggagcatgggttgatggggagggagggaggaggaagggagaggggaggagaacaagaggaatcaggaagattaatctaggcaagggaagaatagagtaggagagcaagaaaagagataccttaatagagggagccattatgggtttaaagagaaatgtgccactacagaaatatccagagatctacaaggatgacaccaactaagatcctagcaatagtggaactgctactttaaatgccttcctctataatgagattgatgactaccttaaatgccattctagagccttcactcagtagctgatggaagcagaagcagacacccacagctaaacactgagccaatctcatggaatccagtttcagagagggaggagtgatgagcaaaggggtcaagaccgtgctggacaaacccacaaaaacagctgatctgagcaagtggaagttcatgaacccctgtctgatagttggggaaacagcatgggactgaaacaagccccctgaacatgggtgtcagttgggaggcttgggcagtctatggggcctctggcagtggaaccagtatttatccctagtgcataaacaggctttgggaatctattccctatggagggatattctctcagcctagatacatgggggagggcctaggccctgacccaaatgatatgacaggctttgaagattccccatgggaggcttcaccctccctgaggagtggatgtgggacaggggttgacaggggacataggaaaatgggagtgagagggagcagggggattgttatgtaaaataagattgtttctaatttaaatttaaaaagaacaaaattcctttaaaagtacattatacaaaaccaaacagccattatctgaagtgatagttataaatggataatattccagaaaatatttgatggtcagggaacaacaaatgacagttgttagcacttaaagaagctaagatttaggataccagtctctctgacttgctctgatccccaaaactctggtgaggaaaaacaaatgttgtcactatcatttatcatttaagtgtctctcaaccaagaggctctgccctttaagactctctttaaaaaggcaggctaaggtaaaagcatttatcataatctttctctattccctaccttccccccaaaagaattatcagtaatgcagacatgaaaattactttaaaagcttaatgttgactggttttagtaaatggtcaattcactttcaaaaggatcaaaatgcctcaaattgtcaaagagctcaaagctggtatccattgattcaacacaatctttttacaattttctgctataaaatgtgcacattgttaggtattgtcaaaataaaggtctggaatatgccctccaatatacaggcatcacagcctcaagttatacatctcaggttagtggaagaagacaaaatagcatctggcataaccattaaaatcaaataatatctccatatggtaagtaccagtttcatttaaaatgactgagaagtggaagaacaagggcccaatcctgttttctctccttaagttactaacttcataccataccatgatgagagaggagggtaacaataagtcatccacatgtttttgttattgttttattttaacaatgtctcactatgtaccttggagagttatataaaccaaactctcctgtaatctgtcatctactagatgcaaggggtaaaggtggcatttgcaaaacatttaaaccatatatttctaaaagtaatacaaaagaatatccatgagataaatggttaagaatagcacaacttacctaactttaagtatttgattactcataaagtgcataaaataaaagccagggcctgctattcagtgagtaactacatgtgtgaaccactttgtaaaggagttttatgcacattgtatttacttttatatcaacctgcaagataagcattgtcaccaacattagagacagggaggcaaaagtgaatcactagtagccacacaattattaagaagtagagacaaaggaagcattaaggaaaaggaagttggaagtgtttaagtgttagaagatctagatatggactaagaactatcattccctagacttcatacagctatcgtaattattaattaacatcatcttgggataatatattatttatgacttactaaagcttgcctgaaggttcagaatgcaaagctagccacaagctatagaggcaggaagtggtaatacacacctttaatctcagcagccatactagcaagctacagagccaggcagtgatggcacacacctttaatcccaggactcaggagataggcagatgaatccttctgagttcaaggccaccctggtctacacaagagtgaagagtaatggagttcatgcctttgatctcagtacttgggatcacaggcctttaatcccaacactaggaggtataaaaggaagaagcaaagggtctcatgtggagatttagttaacagacaggaagagcatttgcctctgaggaatcctggagccagatcagccctttcagcctcagatggaggtaaaagctggcttctttgcttctctgatcttcatcttgaaccataatatctgaatggatttttattatttgtgttacatcagctatagttatctgcactggattctcacaaaaccaggcctattaacaataaatcaaggtggaaggggggcggtccctaccctttaactctgaactaatggctatagatagattctgggaagggaggaaaacacagactttagctgtgtatccttctgctgagcccactagtctctgatagacagctccacatccatagtcacataggtggccctggttaatcttggtgggtcactcaacaaaaatcatgaaatatgaatgttagaaagagagctggggggaggaaaggggaaaatggagtagtagagaggtgggagatgagagtgattattatttatggtaaacatgtgtgaaattataatacaatattttaactgaaatttaaataaaatagagtcaaaaatgtgacatagatctgtcaatttccaaaggtcacatatttttgttactattcttcagtgccttgctttaactccattcagtgttgtttaaggcagtcagtcgagaatcaaggcatagtagactagcaatcatttacttaattcttttactgatatgaaatgtatctcatataattaccccttgattgtatctactcctctgggcctatatggaaatctaatttttttccatataagcacttttctttattatttggaactaactatgtggctcctcctgtaagacttatctgtatagattacctttccacacacaaaagaagcatcagaaaaccatagaggtaggagggcggcaccaaaggaaggacaagacaaaggatataagagctacaactacgatagaaaattctctctcaatgatggcttagtagcatttttataattccactggacctgaacattttagcaatcacaagaactgtccagcttaagagcaaaatgtactattttgcagaagtcaagtttgctatatcaagtcaattgtgattccacacagatttcagggtatttaaatacaggtgccaatatggttaagttgtcttagttattgttttgttgctgtgaggagacgccatgagcaagggcaactcttataataaaagaaagcatttaattgggggcttgttcacagtgtcaagagtgttagttaattatcatcagggtggggatcatggcagcatgctggctggcatggtgttggtgcagtagctgagagatttgcatcctgatcagcaaacagtgtgacactaggcctgtagtggatttttgaaaggtcaaagctcactcccagtgacacatctcctccaacaaagcttcacctcctaatccgtctcaaacagttccactggggagccaagcattcaaatatatgagacaataagtgaattctcagtcaaactaccagagacatgtgtgtgcatttgtatgtgtgtgtacattttacatattagacttttaaaaaatactattgaaaagcactaaatatataattagaaaatatctgcactattgaagatcctatatttttaaatgcagaacataaataagatttgaatatttcatcactgcttgctttgttacatgtgtaaaatgaaaaactaaaggaatgttaacagaattgaatatgcttatacactgactttagtgtcaaactaaactggttaatattgaaaacttcataactactcaaagctactcaaatgagaatatataaagtgctactgtgaaaactcaaggcttaaatgcattaactgatgctggtcaccagcaccaggaatcccccatactcaaatataaagtgtatttctggttgactttacagttcatttcaaataaaattaaagtacaaacacaaaggtgaaatataagaaacatccttgccatatccaggtccgtactatgaatgctaaaggcacaactttccacataagcaataatttctagtttactggctttaaaagagaaagatgggataattgtgagtcatctcatcaagaagaaattttggtttctcccatgtgtgtagctagcaagtttgtctttcctatgggtttggtatatatgccaaaaagctagccataagctgccacctgagtgggttcctgcagcattccagccttccagtctcccacattggtgcatgtagtgtctgttccacctgagacagcgccaacttcagctgcttcattctggcaacaccatggcctgagtggccctgacaatcatagctatgtgtatactggaggacaccagttgaagacaatgatggtccaatgagtcctcatggaagcagaggggcacagaagacataacccagtgtacagtaatagaggaacttgaggtggctcaaggcatcccacctgacattttgggaaagatcaggtgaaacaccttgaatgactatatcctctcactgaaggaacatggagccttcctggagacatagtcctggatagaccccatggtgcactgccagatagttgtccttctttgatatatgacaacaagtcagacacatgttctccattagggctccaggcagcctgtggcactaccagtctggataatgtatgctgtgatgtgcttatctaaagacaaggatagaatcaataaacttcttccctaaggacaattaagggctgagacacttcccttggcttctgagaacacacccactactgattcttgagtgagagcctgccatttgctgtttctatcacatagggggaaacgcagacattctgctgcacaagtttaacaaaatgccctgatgaactataacacataatcagcttcagtaaaccattcctccatttttttttcgacaaaccaagatcatcccagctgatcagcttaagacctgccaagaatccatccttgatggctctaaggagcattccccatttctgttcttcccagtcaggatggttgaataaaaggaataaatctggtaatgtgttttgaagaggtttggcatacatgcctgactgatgtacttggaactagtagttcagcaatacatggacttcccaactatcaaaggcaaagcccaccaagttggctattatcctgaatttattaacagcttgattttactcaacctagtagttagatttaggttgggctaaaaggaccaatgttattttaattcggtcaccaatttgaaatgtatccagcgtatatttgaatagtgatgagtaattaaatatttctgaagacacaaattatcgactaataaataatattctgtgtataaaggacacattacaacaaggcatcttccactgcagtttgaaaggaaatcataatgctatcccataatatttacaatattttctagtttaaaatctggaaagaagtatgaaaaatttatgacaggaagacaaaaatctttttataaggagaggtttttgccactaaaaatgtttaatgattaactgcctccaggataagtggggccagcccacatgtaaacccagattaatgacaagctaagaggaaatatgttttccttaccaaagtgttttaaaataaatcttaaaacattatttttcatatttcataactaccacagaattacaactagaatgttaaaacctgctagcttttaagcttgtgtgtactgaatattgtattcagtgtctgcagtgaatgggtgtgtaagagagggctaggacactgatatgaaatagtattcccactgcagtatgcagtaaatttccctaggaaaaaactgcatgtcaacagaaatctcctagtcttatttgagtttatatgctctacaatccagataaaaatcaagcaaccaccaaacagtgtagtggttagcaactagacaaagaaagccaactaaacatctagaaattcagccttcatattacacatatcaacaaatactttactattcacagatttaatttagaatgacgtttataatttccttttaactaaaggccagtcaaaaatacagtcttcttccttaaaaaggattaaattaactgagcaaagaatattaacactatttaagacatgtcataatgtcgatcacgtctttaaattctgcatttaagctactttgcctcatgaaaaaataagccattatacctatgtgaatctttaacataactgaaaagaaaaacttatggtgatttaaatagctacaatgcattttcatttagtatgtgtcaccaagaattgtgaatatatatcttctctgcttactgatagaacagttctgaaatccatctttgtactagtttttgaaatacgcctgataatataattaatggaataggacatattacaggaacaataccaaaattactcacttggcatatctgaaggattgtatgctctcaggaagttagagaagaatgtatttaaatgctcttctgccacttatgttgtcatttcaaaaagtgatttagcctcttgcagcctcaatcacaaatctctggtaaccaacctcacagggtgatgaaaggactccctgcattgagaatccaatgctagttttatataccttttcaaatgtgctcagatatttgtaaaaccctttccagtcgacatattattgacatgctaagtagcaaaagctttcacacatccactggaagaggatgcctaatattctctgccagcaatgctcttagcctattctcaatcaccaagctgccttcaaaaaggaaagtgtaattccactttttgtttttgctaatttacaagtttttacctgtatagtcaacttttaccaaaacacatttcctatcagtacaatatcagtcgtaacttttacaaagtttaatacgcactaacatggaaagatgaaaacagcaatacaaactttgggaaaggaagtagggctttcaagaagtgcctatactttaatactagtcatgagtttatcatccctgtcagttagcagagaccattgctttctacacccaccaaagtatatcttccccttaaatgtgtacatttaaatacaaggaggcattcttcattcaaacttggattccaatttgaaatatgatatttactaagtaggcgaaatggataatgcaatcactttacaaagctggatttcctctctaaaatggaagcactccacaacctatagaatattattgccaatactacataagatcatgtacacaaactacctagttggtatttaatatgtgtcattttcctcacatatgggactgctcagttaggaatcccgaaccaattcccatttatttccaaaggtgcaactgcgttcaatatagtatgcttatatccagcctacaaatttactatcagaaaagcaacagatggagaactaccacaggaaatacaagaaatccataccagaagaagcattgcgaggacataagaaacagtattctaacagaagggaggggctttatgtgaagcaggattgagactgtacctttaagaggatatcatggaaaggggcagttaataaaaaatgaaatgatgaacactggaaaaatggtacagcacactaggaaattatgagtgctaaatgcctgggttgtggaaagtgttcagtatggacgaatactaggacaaatggtgatagtgaaaagatgcattgtacaactaagctgctaaggactatgtcttattgttccaaaataatactaaacaatcaacaaggtaataacatttatgcttaggatggcactctggtttctctttcttaggataaggtcaacgaaagaagaatccagtttcattcagtcccaagtcctttcccaatttgtcctaatgaacagtcacatgagaaggttaacagggaattttaaacagcacgaaagtagaaggcaagactatgtatatgaatagaacacacattgcaaaagacctatatagtattgtaaatcagtaaagaagacaggagatgattttccatcaagagattagatgagtaattcatgttcaaaatgcaaagcaaatggttgtgattagtggaactttcaagagaatgtagcttaaatgattactggggcttcaacaacatagagattgcatttgactatttttcattttcatgtaaaaatacctaagcctagtaggaaatgtttacaaagaaaattgaaagctacagatcaagtagctttggttcagcatccaatgaggtctcagggcaggaagacatgtgagaaggtgtcatcatgctgacaaaacaaaccagagatcttgctcttgtaagaacatggtattgaggagaactcattctagagtccataagaactttaattcttgggcatatacccaaaggatgtacaatcataccacaaggacatgtgctcaactaagttcatagcagcattatttataataaccagaatctggaaacaacttagatgcccttcacctgaagaacgggtaaagaaaatgtggtacatttacacaatggaggactactcaggagaaaaaaaaatgacatcctgaaattttcaagcaaatggatggaactagaaaaaaacatcctgagtgaaagtattcacttataagtggacattagatgtaaagcaaagtataacctgactacaatctgcaaccccagagaaactaggtaaaaaggggagtctaagagggacacacatgaagagccccaggagggaaaaatagttaagatctcctgggtaaactggggagagggggtaactgggaggggatgggtgatggaaacataaggaatcaagacacagttgggggagggaaggaaggagagagcaataaaagatatcttgatagagggagccattatggggtatgggagaaacctgatgctagagatataatcgggaatccacaaggatgaccctgctatgactcctagcaatggagaggctgtccaaatgggccttcccttttaatcagattagtgactaccctaattgttattataaaacctatatccagtaactgatggaagcagatgcagtgacacacagcaaagtgctgtgctgagttcctggagatcagctgaagaaagagagaagggatcatatgaacaaggggttgggggatcaggagctgcatgggggaaatcacagagacagctgaccctatctagcgggaaataacagacactagactgacagctgaatgtgggtgacagtgctgtggcttgatctgttttggggatccctggcagtgggaccaggacttatcttggatacatgaatgtgctttttggagcccatttcctattgggggacaccttgctcggccttgatacaggggagagggtcttggtcctgcctcaacttgatatgtcagacttagttgactccacaaggaaggccttacacactctgaggagtggcaggagtgagaaaggggaggcagggggtgggagaagataaggaagggggaactggtgctggtatgtaaagtgaaaaatatttttttaatttaaaataaaagaactttctttataagagcaggtactcaaatgtcctaaggtcctcctcttatatatgtcactacaactttccaggataaccatgctgaggaccatggctactgcacatgaatcactggtgaacactctcaacctctctccaaactataacaggagcttcagatatttactaaaagaaacaacacagggatggcaaaatatttcagcaggtaaaaagtgcttgatgcacaaacctcatacagaacctagagtcaatcctcagatttcacaacagaagtgaagaagcaactctggaaacctgtcccctgacctttgttccaccacacacaagttggactcacacatacataaacacactcaccatagtaaataaaaattgtccaagaagcaacatcagcacaattgtcatttttgataaatgatctccattcttacatgtcatgggaaacaaaggaaaattacatctctaaaatgagcaagcaaaaaaggaaaagaaatttcagaatagaaagaaatccatgagaatcaacttattgcaaaacaaaaggcctttaatgaatctagtctttattcctcgtgtacaaaaccaggaagtcagtaagacaaattatgatttttctgataatgccttagtagacaagcatgccctcctccacaggaaggatgctagcactattcttagtgtatcatttcatcaggaacatggggatagaaaataaatcaggacttgaggtctacactgccaaaccaggtagcctctggtcacaggcagaagcctactacttgaaatgcagcaaggctggaattgaaatgtgctataaatataagatacacagcagattttgaagacttagtataaaatgatgtgatgtatcttttcaataattttacattgactagatatagaaataaaccgtattattaaaatgaactttggatatttcttttcacttcttaaatgtggtttctagaaatttttaaattacatatgtggcttacattgtatttcttttagacagctctgctgcagatgaaatttttacactccttctggtaggatattctatgctaagacttcactgttaaagtctaaataggtcttgcatctttgtcggagtaatgcaaaaatctaaaagcagatatccaaacaaagtagagtgacactgaataccaacctgatattaattacctctacatgcaaaagaatattatcagcatcaacactcattttgagaaaattaaatttaagtggattacttaaaagcatttggactgacaagaagaaagaaaagttcatgcccaaagtaaaatattctttgctgcaattaaaatctcaagttaatggtgaacctaatttgacaaaaatcaggtgtctcgttgttttagtaatttcactgtttttgaagatactccctggcacagaggtaaaattaagtctctttaaattacaaatagcaatgtaccattttctcaattgtaactaaaccagaattggcagggtaacaactcacagagatcctataatactttatgtctggaataaagacaggactcgtttgaattataaaaggtaaggacatttaatactaagctatagctgaaaggcaaatgcttgcacaacatgttataggaagggagaaacattcatgtacaatggggagactgaagcatttagggaatggacacaataattctctaacactgaacaaaagcttcagtactggactcaaacagtttaaatctagttggctcaaccccaaatgccatgttcttaagcaccacatatatcatcaaagatgtaaatagatataacttctacacacacacacacacacacacacacacacacacacacacacacacacacacaaacacaccagacaccctgtggtcaaattgcttgagtaatttacaactgcttccttatgaaggggtccaggatacatatttgcaaagttatactcacctgcatccttttgccctgctaactttatctcatacatctcttctgtataatttatctgaagtatgtctacatgagcatatcttagaaaatctgacactgacactgcatataatacagatatattgtgcaatttgagaatttttctctcctcccaatttacaaatgatagttatattcagctattaggattcaaacacagaggtaaaattttgatggtaaacagtagaatccaaattttctgtcaagagaagcacattctctgatagcacatttaaacactgacttagggaaattcattacaattctgcataggcttagctccaatattagaaacatgcctctaggctcatttatacaagaatttcttattcagcatctcagctgcacaggtttccacacagaaatgagcaggtacaaacggttagggcttcataatgagtcaacattaacataattactttccatttcatctattacagtacactgtttgactctctcatttcttttcatttcaatcattcctttagaacacccacaaggccctgttaaagaaatgagactttagaggctgtgctatagaaactgaggtgagctaaatagttttgtaattttcccttagaaatgatcaaacgttgcacactaacagaaatggtgtggttttgtactctactacaatatttctatctcttaaaacaatgtatacaattagataatgacacgaaagttatttactctgccatcacaaaatctgagtataaaataagaagcctattttgcttgtgaacaaacagaccttaatctttcaaagttgtgctgtctaccacagttatctcaggggcaatgtacttactataattacgttgccactgctgaaacagtttttgaaaagccttttttggatgaagaaattatctccggggatagtttatccaaatatacatctcattgctttatattttaagggcagggcatgatcaattcgctcatttatcaaatgtaaagccaaaaaattttgctattcccaaagattatttccacactccaaagatcaagatttactaccagcacaagtactcaacagaaacattacttgagttcaaaataagccccaagctcaccacagaggaactaactgggtagcttacttaaattcgcagtcagaatcccccaacttgaaagttgaagattatagtgtctactgccaggcacataatgagggaatctggtaaataggagcatgtgaaatagtagtagcatggtgcctgataagaattaatgatcagtaggaaaatatatgagacccaggtcccagcaaatccctgatccttagactctacactgttcctgaatggctagccccagagcctcaaccgagtaaaagaaacacatcctagattccgggcctgagccaaagaaagaggcactttatttgcaaatctagcgccagggaaaaacaccccatctctgaaactaactctaaaagaataaactttgcccctagaatcggaacctgtaaaaaaattctcccaggccctaaaattggagcctaacagctaaaaagaaccacagaaagaaacacagtttggccctgaaactacagccatttttgctcctgacagaaaaccagccaatccttgagcagggaaaatcaaccaatccctgagcagtaaagtagttaccctcagcctatgggtgtgaacgttccagcccagggagataggggaatagtaacctcaagtctagaggcataccctttcctgaccccagcttagggaagtagtacactctagtgtgggagcaacactccccatagattttaaatctaggaaagtagtagcccctggttgaggtgtccccctgtccccctgactttagcaggaggcagcctcttccaatctgtcaagcctgactgtccctatctttccactgaccctagcccatggaggcccaccagaaaccagcaacacctcaccacaaggaagaggccaatcagaaatgagtaaacaactccaggtgcctgccttatgagacaacaatgttgcaattttccctagacgcagtgcagccaaccagcccagtccagatacccgggtttgagccaatcccaaggttgtaactatgcagttttggaaggcttcagccaatcccaaggctgtaactatgcagttttggaaggcttcagccaatcccaaggctgtaactatgcaattttggagggcttgagcaaatcccaaacctatagctaagacaatttggagttcccaagcctctccctcctgcctggctactatataaacccccttctctctcttctctgagtctctccttctctgttcttgtcactgctgctgctgtttcagaaagaaggagggacccgtgttaacttgcgaataaagactctatttttgcattagagtggatctcaaggttatgattcaggtttgtggtttggggcttaacatatattgtatttgtattgtagaaaacaaagtttaaaaatcatgcatacaaaatctaagaatggtcacagttttgatgtactgacaatgatcttttccaattaacacaattattctaggtatatgtccttctacccgcaataatcaaggaatatcactgaaggaaaagacagagttcagggaagactagaggaaaaaattcttctaaatatgacaggggtattgaactcatgaattcccaaatcatctgtgtttgcttacacaaaactaacattacagcatgcattgaggagggatacccaagacccggccctatctgaaatattggcagatggtcttgagagaagtgagtcaattttatttatgggtgtggtccctggtaagttgacaatgctgaagtggatggcacacacccatgagtatatgagctgcagcactaattagacacaatgagttataaaaaaaaaaagtaaaagaaaaaggaaccaggaagaaattgagagttcacaggtacagcttccctctcaataatatgattacctgaacaagaccaccatgacaataccagttgacttgccaatatggacagggaaattccacatcattctacccctagatgttgatctacttgtgttgaatgcctgcttggaaatggagaatcagtctccttcaagaagtagctcccacataggctgtccaattccaagtggtcaaacttgtatacatgtacatacaagaaaaaaataagtggactcaagttaacacgggcccctccttctttctgaaacagcagcatcagtgacaagaacagagaaggagagactcagagaagagagagaagggggtttatatagtagccaggcaggagggagaggcttgggaactccaaattgtcttagctataggtgtgtgtatatatattatatatgtgtgagtgtatacatgtatatgtatgtgtgtacatatatatatatatatatatctgtatatatatacatatatatgtatgtatttctgtatgtaacagtaataataaaagaattcattcattaatttggaagtcgggacacaggaggagttggagtagaggttgaagtgacgtagatccagtggtcatgtgtaaagttaaaaaaaaaaaaaaaacaaaattaccaaacttaaaaaacagatgaccttggggtggctggagagacggctcagaggataagaacattaactgcccttccagaggccctgagttcaattcccagtaaccacatcagaacaatgtatacataatgataaaagaagaactgaacttgggaacaggatgtggggtggagggtggtggccagggaagagttgaaggggaataaatagtttgtatacatttctgaaattttcaaaaactaacctgaaatgtgtgtgtatgactaagtttcattcgttcttaaaagtagcatagaattttataaccaaagtccattcctcattttatttaaagaaatgtaatcaaaatttaaagcagctgatacttctgggcacactatatcagtgaaagagaaattaaaaactctgcttctctccattaagaaattaattgcttatttgtttttacatgtagtcatgtctagcctttcatgtaaatctgggagatttgaactcaggtccaatccataaggagttacaatgattaaatatttgttgggtttctttctgtactttgtccaaacctgaggactcattattttacctggaagtttgtagctgctctttcagatacacacacacacacacacacacacacacacacacacacacacacacacacaccaatcaggatgtaataatatgtaaacatgttaaactgtgaagatatgtataaaggtcatttggaaatctgtcattgcctaacatgcctgatacttcacattttcatatccacatttacctaattaaattaaaaagtaattaaaggtaaaatggaaaatgcctaaaatactaattaatatcgtctcagagaaattactttattttggcatgtaagaaaatgtaaggaaaaggatacatcacatatgtgtattttattttttctcagttttacctataatatctctatcccttactttaaatatacctttaatactgcttcaaataaaattaataatgtctgtaataggaagttgagaaaaacagagctatcatgcaaaataacactttgccgttcctcccttcctgctctgtaatgagtatgaagaattagtctaggtcagcctgattacttagcctatcagagaaaagaagaatagttagtcattaattatattcattaaattatgcaaaatctgagacggttttgctaataaactaaagtataagtagctatataattatatggaaatcaatatgcctttgagaatggtcatttatcaagagaaaattcattccatatccaaacagcattttatgagtaccgtaaactcttgataccaaaaatttgctaaatcattagattatacaaccctaccaggcaagaatttagagcataaattgctgcctggctctcaaggtctttaccatagccatgggtaagatgtcatcatcaacaacagtggagcaattacaaaatctagctcgctgatcaggtactgtgtttgcacaccacctttcttgtacaacagaaatccttctatagatctttctgatttaactttagacctgataagataaggaaagtgtgattaccaaattcccttagctgcttctcatagggaaagtaaaaaaaaccatcaaacatgaatttccatgcaaaacagcaatctttaggggttttaatgcagttgtgcagcctcctccaggagccacaaaagagaggagagaccatgttctttgtttcagagactcattgtggagcgcatgaaatcactttgtacagtaaaagcacgtcgagcctaccatgtaataattattcataatcatgttttatttctcttaatttctgggatatatgctctgaattgtatcagttttctcaagactatatttataaaacttcttttcctttttctttctcaagagtacattttaatgtacaactgaagtgtcacatctatttctcagcagagcaaagcagtaaaatgtaaatttccttgatataaagatatcttgagatttttattccttatacacattgtggaagacacgaattaactccctgaaggtttgctctgacacctacctgcataaatagcacatgttcatccgcacccacacaagcatgtacacatagaaaactacaagataaataagtaatgtaatttttcaagagaatctggaaacctgtgtatgagtttttttcactatgttgattttgatgtgtatgtggacatcaatgtgtggtcattttcttaaacattaattatgcacaagcagctattaaaagaaaacccaaaataactagaagcttgaggagtggaagacgatgacacctatttcaaaatacttcttcatgatacaacccaatttgtattcaacaaataaaaaataaaataccaaggaaaacaagtgtatatatctaagacactacagaaaaatgttagaggacggtgatctctaccgacaagaatacttctccaattatttgcaggttataaacaaccatatgtctatatttctatcaaagtaacttgagaagaacagttaaataaaacttctaacattatcatttaaaaatcatttaatactttactctccaagaagtacgaaaactaaaacttctgagctaagaaaagctctggaataactgccaggaacaaatttataaggtcaggcaaagatcgcaaatatttattcagaaatatattatgctacatgtcatattactatccaagtacaaagtgatataaaaatatttctgtggtctgctcatacaggcttttcaattaactacccagaagttttgttactaggaaactttggcatattaacctcttctaccatttttcacccttcagcattgagcttgaaatgggatgtatctcagtggtagaatgcttgcccagcatgtctgagtcccttgctttgatactcatcatcatcatcatcatcatcatcatcatcatcatcatcatcatctctctctctgtctctctgtctctctgtctctctctctctctctctctctctctctctctctctctctctctctctctcacacacacacacacacatacacacacctcatacacacacataaaaagaattattttacttattaaatttcacattgataatcatacttcaaaaattcacttagtagaccctgtacacaccactcattgttacattagttacttctgtatttgatatatattacaaaccatcccacctcaattaaactgtaatagtatttgctatgacctcttaccaaagtatacatgaggcagtaaggaaacaattgtattttagctatgaaagtaatatgtgaatgttcaaaagtaaagcatatgtcagggtataatgtaaaagacaaatgcctcaccaggcattgtgatacatatctataatctaagctgcgctacaaagaaaggactagcataactgggctacatagtaagactaaatacatgcacatgcatatacacaagtacacaagtagatgacacacacacacacacacacacacacacacacacacacacacttgtaatttatacacttccaagaaaaaaattattaaaaattttatgtaggtctcatactgtctaacaggtctgtcaaggataccctaaatatataatggtgatcccattatgactataaagggccaagcagtggtgatgtatacctctaattccagcacttaggaggcagaggcaggcaggtctctgagttctaggtcagccagatctacaaagtgacttcctggagagccagggctaagagagaagctctggcaaaaatcaaaccaaaagaaaaaaggaaagtaagactgtaatagactagaaaacttatcacctaggtatataaaatataatgtattgctaatgtttgtggtaatcttgatataaaagaaaacctattataatcctacttgtatgaaaaaacgacaaatacaaggatgtaaaatacataagaagtggctattcatggattataaaactgctataatatattattattgttactatactgaaaactacttattaatcaaaagttaactgtaaaacaacattaagcaggattttcaggagttaatctaggagaaggcactgttggcagtggagacagtgaatgttatacatgttattcacctatcagccttccatgagaacagtaagtaggtcacagtggtagatgttgatattaaattgaccttgtctaggcctgggatagtgtggttttgcattttagcttttaaaaatcaaaatagtatagaaagaaaatacattaaaaataagtacactaggaagtctaagtctaggtttgtctaagaatactatagaatattcataggacaatgggaccagataatgccatatttcagtaattaaatgatgcatgatggtatatacatccaatgaaactattcttgttactttgtacctttattcctaatatattcctaatattgttaaagtgtcactcacccaaatttctgctgttcctccttaagaggacaggattgtgtttccctcctccttaaaatcagatgtagctaggcacaggagaccacttcctaaatagaacaccagtagcacagactctgagagcaacaattaataaatgggaacccctgaaactgagaagtgtctgtaaagcaaagaacatggtcaacaagacaaaatgcgccccctacagaatgggaaaagttcttcaccaaccccacatctgacagaggactggtgtccaaaatatacaaagaactcaagaaactagaaagcaaattgccaaataattcaataaaaatgagttacagatctaaatagagaattctcaacagaacaatctcaaatggtggaaaggcacttaaggaaatgttcaacatccttagtcatcagggaaatgcaaatcaaaaccactctgagattctaccttacactgatcagaatggctaaaataaaaaacaccaaagacagcttatgctggagatgctggtgaaagtgcaaacgtgtacagctgctgtggatatcagtgtggtggttcctcagaaaattagggatcaacctacctcaagaccctgcaataccactgttgggcatatacccgaaggaaggaggcacattcacaccacaaaaacatttgctcaactatgttcataggaacattatttgtaatagccagatcttggaaacagcctagatgtccctcaattgaataatggataaaaaaaaattggatacatttacacaatggagtactactcagcagtaagaaacaatgacatcctaaaattcacaggcaaatgggcagaactagaaaaaaccatcctaagttaggtaacccaaaaccagaatgacaaatacagtattactgatacataagtggataccacaaataaagcaaaagatacccagcctacaatccataaccccagagaagctnnnnnnnnnngtcatgtgtgtttctcttccagaaacagatggaagcagatgcagaaatccacaactaaccaatgggccatgttcctggagtacaatcaaagtgagggaggagcaaatatatgaacaaaggagtcaagaccatgatggggaaactcacagaaccagctgacccgagctattaagagatcactgactcaggtctgacaaatgggtaacctgcataagaacaaactaaactccctttatataggtgataatggtgtgactgagacaatatataaggtcactagcagtgggtccaagacataacactaatatacaaattttatatggagcccattctatatggagaaataccatgcccagtctagacacaggggtgtgggggtagagacatgcctttgtcctacttcaacgggatgatgggacagacctagtagacttgctaggggaggcctcaccatctctgtggagcagatgggagaagggggaattgaagggaatgggagggaaggagggaaggggaactgggattagaatgcttaaaaaattaattaattttaaaaaatacagcaaataaccaaagtaaaaaaaaaaacaaatcagatgtagttctctgatgtagccaatgcaacatgagtataagtgaaggatggtctttcctaacataagtagtaagatgtcattcagtgtcttgttcttcgttttgctatatgtagagcataagatcctgtatgagcataatatgagccagagaccttcagtggcagatgatggcatgctgcattagcagaaaatagctgtgacactgagatttgaagtatgctctaggtcattctcactgatagcaaattctaaaggagattcgcatctgcacatgcccaactacctcattaactgagacacttccaaaatagcactttgatgagtgattattctaatttgctggatcaataagtagactgtttttgtttgcttggtcatttgtatcttttggagtttttttctaacataccaaaactagtgctttgaatgggtttagatgctactagggcttgaatgtgacttttcagggagttggtctacaactggaggcattgttttagaagctgcagaatctttagcaggttgcgcctaactagagaaagtgaagagcaataatcaagggggggttagggttataattcaactctctaccaccacccaccctctatgcttcttggtttggtaccaagaaacaaacagctgctgcaaactccctgatccacagatgaagccccagttgccatgctttccttgccatgatgaactctttcctctcaaactgtgccccgaaataaatccagtcttcccttaacatgattctgtgaggtattttatcacagcaaggagaaagtaagtaacacagatgttaaagtacattgaattctcacaagtctgtaagatacgctctattcttacacagttttacagataaggaaagtgaaccatatggggattaagctgaaattgtccccaagtgctcagagatagtaaatggcagggccaggacatgaacccagccttgactttacagccaatgcctttaattgcgaagtatattgctcttccaattttcagaaaaacagcaaataaacaggaaagtaaacaataaacagtaatagctatgtggaccacattttgacagagaactatgtggagccactttatggtgggaagttaggaacagcatctttaaggaagtaatgcttgagacctgaaaaacaagaaaaagtcaggcatggaataagacaagggaagaagtattaaaaccaaacgtatctgatagtacaaaggtcctaggagtggaaatgacctggcatattcccgaattaaaaagggtagtgtggctgcagcaccctgaaccaaagataaagtaaagaagacgtggcttgccaatgcactactgagggacaagattacatctgatattcttgttcatacatcttcacaaatttgcattcgacaaaagcagggaatgaatctcaaggactggaattattgcgccaaattttggaaggtgtcatgaaatttccctctaaaatgataacaggaaagaaagatggtgctaagaaaaacacagagcttgtctccctccatcacactaacatgaagcatttcaaacgtctggcaatgtgataggttttcagaaaaggttatgtcactgccgctgctttcatctacatttatctaattttgcttgaacttaaattgtgtatacacacacacacacacacacacacacacacacacacgtatctatgtatgtcatgtgtgtttctttagttgtgacctatccagaggcaaagaatgacatctcttaagttggaatctcaatttggttacaattgtttttttcaaacaacaaattttgtatgttaagaccaggagccctctgtcatattttcaatctctactgtagatgaagatcctcttatcactcaaattttaatgagctcaaaacttctttgatcacacactaaattcccatgggtattacatctactgttgggtctcctgtgtcagtaatctatttgtctactcgtaaaagagaatcaaactatttaattactactcttcaaatgttctcttccaagtaaaatttcaggagtggagacatggcttagccattaaaggaaaggcatgcaatcagttaaaatttcacatcttgttgtcagtccctagaaataatcctatagaaaagttattgatagtgattctttcttattgttataataaataagactcacatttgttaatgactgcttaggtcactatttgttatgcattttatatctattatcagatattcatataattttatgtattcctttataaagtatatatttctctaatcacagtggcaaatacacgttgtcctctcctttcaggaaaagagggaaatgggtcaatactggtaaccctggtaacaataaacatcaagatattgcctctgatcttaaagggaattaattaagtaatttctcagtatgcataataactatattgctttcaggtagctacatttatcatgaaaaaataattatttttgtattatattaatatatttattaaaaacacatgaaatatatcataggccttttgctaatacatactgaagtattgttaccatatttgatttatatacaacacctatcatctgtctcccatgaagaacccaaacataccacttaaataattttcttcagaaaaatatggtctcattacaccaaattacacatacatatttgcaaaaatagctatggttctctttcttattctcataaatcacaacaatctgtctgatgatgaaaaggggagtagagcagaagattagaaatctccatgatgtaaaaatggaattaaaattttacaacaaatgaaataaatttcccacactcatgggatactagtgtcttgtgagatacttataaatatgtgtaatgacatcacctaagatatggtgtagtgagttaactacagataattaagcattctatcatatgttacttcaaattatgtatcatgacaatgtgtactgtgattttctaaagaagaaagaaggttatagcatggaaaaattcactccattaccaaccaaacaactcctctatccatttataacaatatcacctgaacccttgtatccaaacacaactactatgttcttgctgctggtaataactaagacccctaccagacaaagaaatctccctctgacaagagaaaatgaagctgatgcagtgagaaatgcagagacgagaaaagcattagttttccagaggctacctgacctgggatgccacagctattctaattgtaaatagagcatgttcctctgtagtgttgtgttctaaaatattcttgtttttaaatcaaatttcaagatacataaatgatacaaagaacaggctttgcaggttgcaataattttgaaagtataaagggtccttaacactaaaaatgttggaaagacataattatttttttctatgaaggctttgtccctctcaaacaattctttttctttcccctgaatattctccttccagttcttttaaggtgttctttttgttttaactttacatggtctattaacttggactatggtttaatagaatataacagatacaataatcgtcctttgaaatagcatccttaacactacgactttgctattcacaatatgctatacgagatcttcattttctctctctaaattcttagctatttctcccttgctcaacaatagtatattcaggtgttttcaaaagtattatacatctcaaaaaagctgaggagcagctcagtccataaagtgcttgctgtgcaattatgagggcctatatttgctctccaggtcccatagaaaaagccatgtgtgttggtgtctatttgtaatctcagtccttggaaaaaatagacaagaagaccatagggctcactggctagtcagcctaacctaaccagtgagttccaggccctagactgttgcaaagaaaaatcaacagccaaaattgacctctgaaccccacacaaatgcaccaacatgtacacatatgtacatttacatattactgacacaagtacacagagaaacatgaaaactaaatgaggttactgtacagaaactatagtttataggtatggattgaaaccatgaatacactcattgattaatatacattagctgataccttgcttttttcctggaaatgttctgttttaatacatcactttctatttttatgcaaatattgaagtaagaaaattagtccccaaatgtgctctttaaaatgtgggcttaataaaaatattatgtttcatgtatcattaataactattctttttcaaacatttaatcattcccccatgtaatccaaatactacctctttccatccaataatttgcattattctactttcagctatccagctctatgacttgggcaagatacttccccttaagagaaaggtcacattgggataaacgatgtattccagctctaatatgctgtcacatcagtcatgtgccataccatctcagttggtctaagccagtggtttctcaacctgtgggttgtaacccctttgagtgtcaaaagatgattttacaggggtcacctaaggccatcacaaaacacagatatatacattacaattcataataacaacaaaattacagttatgaagtagtaacaaaataattttatggttgggtgccaccacaacatgaggaattataataaagggtcacagcattaggaagattgaaaaaccctagtctaagacaatctcatgtgagacaaactgaatgagagagaatgctcagtttatatggaagaacacagattgactctgccctaaatggcagttactcagcactagcaaactgatattaacatgctataatgattgttccattttttatcatttagtggtgtcttttttttgtaactcagtactctgctgctacaaatacctgagataaaaagaatgtaggaaggaggggaagtggcagggaataagggaaagcaagggagggggaaaagtaattataaagaaggaactatcattttggctgaggtaccagatgattcagtccctagtcagttagctctactgcttttgggaactgggcaagagcaaagaacaccaatatgttgtaaatgtgactgcaagaaggtgctcacattgtttaccaggaagctagaagagagagaaagaccacaaagactgctcaaggacctattttcaacctggttctacctccaactttccaccagtttgcaataaaaaaatagtaaaaaaaaaaataaggaaagctaaggtagtcatctaataacaagcttttgagatttttgaaatgaaactttcatctgatttggaagacactagaaagtatttactactagtggaagaagggaaggtttactgtcattacatatgagaaacacttaccaaactagtaaatacctctcattaagagaggcacctaagcaatacaattgtgctagctggcatgcagcatccatttgtaaaatgtggtacacattcatttttaagctttccataaataattagaggactcaattcctcacaaatgcaaatccactggcatttttcctgaatcactcatgagatgtatcttttgagaaaaaccaaaaatgtggaagaaacatcatgaagatcatctgtagggnnnnnnnnnnnnnnnnnnnnnnnnnnctggtcctttacaacaacacaggatgttatcatctcttccagattacataagccaaagataacactatgaagcatttatttgtctgtttttgaagcactattgccatgaacttagacaatgggactattatttgtaatacaaagagcagatgggaagatgttaccagctaccagacttgtttctgttttactcttcacatctgtaccacaccatctcatttccaaacagttcatcatttaagaacatagaatctccctcacatgagctcttctattttctatgcctagtgctcagttaaatttcatctgtttgcactatttccccttagaaggcattgcttttactttcccagtctactaaaaagagacaaaatccacccaaaaactatttctaaatgataattccccttgaattgacaatcattatagattctctaaatacaacatcccacatataaagttgaaataaattactaatataatggtgcatcttaaattgaaaactagacatgatgaaagcaataaggctatgagatggaaagtatcaaggaacacagattcctgttttcccttcaagttaataggatacacattgaacatacttatattgcttatatctgaacttattaacagctccttcatccctttccactacatcaaaaaatagaaaatatatttcttgttttctgaatgaaatggaatttaaataatagctcccttggcaaaaaaaaagacagagatggagaatttattaaatttgtaattgctatatcataaacattatgagaaaataaagataatacaatctaagtacattatcatttatttcctcttgttttattttaaatcgaatatgtgtacattaagggaaatttagaaaatatagttaacacaaaatacaaaaataaaagtcaccatgttttctcatctgaagagaatttctattaatattttgtcacataatctatcctttttggccctgtgcaaaatatttttaattgatttcatactatatgcattttctgtttaatgtgttctgtttaatatgtaatgaaaggggctggagagctgtctcagcagttaagagcacttgtttttgcacagggttcaattcccagcatccacaggacagctcacaactatccataacactgtggtatatagacatatatagttgcaaaacactaagaaacataaatgtaaaatattcaatatgttattaaagtatcacatacaattaagtatatagaatatcttcaattatgtaatagtttatcaattaacatgtaatgacttcttaactcatttaaaacctagatttttttttactatgagaaaaatgtaacattaaatatccttagctatcatttttgctcatttccttctttgggaaatttttctagaaagagaatttggggtgtcattataaacatttccatggcttctattttcacacacaattttctttcaagaaatgcactgtctcacaaatcatccactattagggtattaatttcttcagctgtataacaacaaatacacaaaggtattcctatattatcattttttctaaatttgcttcaaattcaccacatgttcttcaatactgcatattatttacaaaaggtcccctttcatatagactagaaataagaactattttcttttaacacttctatttttatttctccttttctaaagccttttgtagcctccaatcaaatagcatttacctggatttctccctagtgtgtgtgtgtgtgtgtgtgtgtgtgtgtgtgtgtgtgtgtgtgtttgtgtgcaattttaccttcacacctagcctctcagttgctctgacgagtatggagaaaggtatgataaagtgaatctatttctagttttccaaagactttcttgattttccagcaatgagttgatcatttaaaatattcctaatgatttctgaagtgagcagaaggtaaactttcaggctctcttgctctgaaatgtgtcattaccacaggtacaaaagcagcagtcgttgtgaataccagcatgtttagctccttgcctccatacaataaatattacaatgtatgctcaaagatatctaaactattcttgaactggcaccttctgattaatcaaacagtactagggaacaatttctaggctcagcttccttttagtcacatgtacagtcgacagcaagcaagaaggtacttggaaggtaagtagagaaaagcacatcattgagaaaatgagatctaatattcttcagttttgattgctgtcattacataacagttatgtttacataattgagataaatttacaatataaataccatttaataggaatcggaaggattcttaaagccagaaaatgtccccaattcccatcttttataaattctgtttcctttatcggcacagggttccactatgtagacctggtgggcctggaactctctatgtatgccaggctgacactcaactcagatctacgggcctctctctcccataattaaagatatgtactaccaagccaggctgtctttcagaaaatttaaatgtattttatgatctatatgcaatctaacaaagagtagtatagaaacttgcacagtcatgactaagaaattacaacttggtgttatacatcatgatgtttaaaagcagtcaaaacaatgtatttgacagagaaatctgaaagagacaagaaaattttgcctgttgtgagccttgagtgtgggagacttacttgtatgtacacatggtttacaaagccttagaaaaagagttaagtgcaaggtggtggtggctcaagcctttagtcacagcactcaggaggcagaggcaggggtatctctgtaagctagaagccagccaggttccaggacagccagggctgttacacacagagaccctgtctcaaaaataaataaataaataaaaagaatgaaaaatttcaatgtacctttaaaatgtttttagagtgaaaatagcattttaagagtcaaaattcagacccagtacaagtattagtgacagaaaatttgtcagttacatccaatctctcattttcgaagactacaaaaagctatgtatagagacacaaagtctcacaatgatggaaagatgagtgatactagacttaatattgaaaagttacatttcaaccatagtgaaatttgaaagaattcatcattaaaaattaagaagtgttcatacattcctttcagtgtttctcctataatttcaatctttaataacagctctccattatatagatttgtgctttccagtttcagccatgcaagttcaatagcactatgaaatgcttaatggaaaagtcataccaataagcaatttgtgcattttggaccacctgtattgtagtagtttttacagatgtactgttttactcttagttcttgttaacctcttactgaacctaatttagaaaccaaagtttgtcaggggcatgtaagtatgcattggaagcacagaatacatctaaatgcccagctgtctaaggggccaagcgtccacagggaggtcacagatttcacctccagtagaaaagaaactatgggacttcaaagacatgaaatgattgactcagtagacgtgagacatgatctgatcatcattcactgcatatcatgtagcaaatgagaaagttctagactcctgtctgcacagggactctgttatgaggtccgtcacaaagcactctgtatcaccacatgtgaagacatgagacactgagatggaaactcatgccaaaggttagtcagctctacagcttcacccggaggaaaaaaaaagagcaaaggataaaacaaaacaaatatcctaatatttgaaaaaacaacacttttaaatcaatttgtacattggccaaataggcctggcttctgattaactgtgtgatccttatcacatggtccacaaacagctttcacaatcataccgactttcttcctcttctgtcaccatgttaatgtctttctaatgttaaggtccttttaaattaatttcaactttcctcttagcctgaaagagacttcctattcacatggctaatctgttcacatcattcagctaacagatatccctctgacaacaggcttctctaagtgccaacattttccattcaatacacagtgccagttatgccggtatataaaataggaatataaatcaaatatagactgatgatattattgccgttaaaaaaaattgggtaaagcaacagtatagaacccagaaatgaactttctcacataaactcaactaatattgtacaaaagtagaatacacaatggagaaagaatagtctcttccttaaatagaaacacataatagaaaattattcagccacataaaaggaaatcctgttatattctataacaaggataaatgggagaatattatggtaactggaattagctgacagacaattgctatagggtaccatttacaggatgtacccaaatcagtcaaattattaatcaattaatcaaagcagaaagtagaaccgtgggtgctagataatgagtaagcaaaaaggagttcattttcagtgattttattcagtcatgctacatgaaaaccctttgaaaatatgttgtatagcaatgcatctacagcaatcaattttcttttgcatacttaaaacattattaaaagtgtagatctcatgatatgtgtttggggcacaatactcacatgctaaccacattaaaaagtgcaaacacagattgctactctgaaataggcaagttgtttattttggaagaaggaggtttctcttcagttatgacatggaagaaaaacagtctaggaataatgagatattctcattaaataatttgtaatgcagtgtgcatttaagaggggacagattaaagaaaacatacagtcacaaaaacccatccatgtgcacacataaatatatattcatgtatatatacacacatatagatttatatttatagacaaaattcacaggcataagtgctatggacaaaaactgagagagacaggaagtgtcgtgagggaagattgtaatttccaaagggatgatttgaaataggcttcatttgagcaaagctggaacaaagaatggactatggcaaagaggtatcctatatagtggttattaagtctgcttacatttattcatcatatctgaggggactgtatgtgcaaaccactcagcagatgaatattatagctaaggatgacacagtaacatttgaatcctttggtgatatgaaggactatgaccggaagaaacaatccactctgaaaaagtgctctgcctgggcttttgtgtgactgtcacacaggcgttcagaacagaacactgccaccatcgcgctagctctcatgcaatctgactcagactgaaaattctcatcaccttcaacctgaaccgagttcttgtggagcactaccttctaatgtataaatagaaagagagagaatataagaaggtttatggaaaatctaggcaaagcattgtataggtattgtaatagtgactgtttagaaatattactcctaatgttattattatctgttgagtggaataattgtgggtgtgtctagttatggaaagaggatggtagatgagatcttagtgtggccttcaaatcacacagtataggaaattatcttttccaattacgcagaatctgcccttgtgctgactttctccattattcaccatcactgtaactgagacacacggaaagcttaggaagtgaaatttgaaaagacagctctttgttccactgttgtcacctgccattggaataaatacagatgtgcttttagagaaggtttggtgattgttttctttaaaaagctaatattactaatttctgccacagatagtattctgatctatctgtggaatttcccatttacatatatattattttgctggtatttttctcttttctattataataatccaccagcgagattcaagtaagaacacccagaattgttttaccctaagacaattgataaacatacaactaggctgatacattagattgttacctaatgacttttggcaaatgtatcacatacccaaagctacagtttcatacaaaatattttcactctcctaaaatttcacagtctctgcttatttgtccatctatccctctcccctcagcattaatcttctttgctgtgctcatattttgccttttgaagtgtgtcacataattataattgtacaatatgtggtcttttcagattttatggcttgaaagccaatttctttttatcactaaaaatcccattgaaggacatcttgttgcttccatgtttggacaattattaagaaagctaccaaaaggtttaaagagatggctcagcggttaagagcactgactgctcttccaggttcaattcccagcacccacatgccagttcacaactgtctattccaggggatctggtatctggcagaacaccaattcatataatataaaaaatcagtattttttaagagaaagctgccaaaaacattgagtgcaggttttaatgtctctgtctctgtgtctctgtctctcactgattttgcaatactgaggattgaaactagagcttcctgaatgttatgcaagtgagaactctcccactaaatcacatccccaggcctaagtgcaggtgtctgcatggacagaagttttcaacccaattgagcatatgataagagtatgtttagttttgtaagtaacaatccaactgtcttttttatttctttctctccatttttatttaaattagaaacaagattattttacatgtcaatcccagttccctctgcctcccctcctcccctacccccctgacaactaacaccctacctatcctataccctttagtcagcagagaaggaggagtgatgagcaaaggggttcagaccaggctggtgaaacccacagaaatagctgacctgaacaagttggaactctttgtccccagactgatagctgggaaaccagcataggactgatccagacccccatgaacgtgggtgtcagtgaggagacctcaaatctatggggcctttgtagtagatcagttcttatccctagcataggaatagactttgggagcccattccacatagaaggatattccctgagcctaggcacaagggggtggccctagacactactgcaaaggatatgacagattctgaagacccactatggaaggcaacacccagaattttaattttaaaaattgcatttcattggttatagctgtatatgaccccagtgtaattttctgttttctgttaaagtagacaataccgcatgtaagttgtatgttcatctatgcatgcatttacgtgtatgcacatggatttgatgtgtgtgtgtggggtgtgtgtgtgtgtgtgtgtgtgtgtgtgtgtgtgtgtgtacatgcattttacgtctgtccccattgaaatctaaatacaagctgttaaaaccacacctaaaatacagaaagggccaaatatatacttacaattttgcttaatttctataattacaaccaggggatttaccttggtgtgatgccgttctaggttgtatatccaggaaggataaagtatttcagtgacactccaactccatgagataatggcttccatatttgaaagtaacaatcttacaaagcagacgctttcctcaaaagatttaagctaaacttggagcattatcagtgtctgcctcgaaagacatgtttttttttttcttattatccaaagcaattactttttcaagatgataatgatgacttatttatgttggataaattatttttaaatttcagcatgtatttataactttattttaggaacactataaagacttgaacaatggccattctttaactagaatgatctatggctacatttctctaatctataattaacttgcccatctaccaaaattatggttgtaaaatgatttacatttatagaacaaatattaaaattcatagtatttcatatttagaatataacaattcctttcctaaaaaaggatacataaagctgggcattggtggtgcatgcctttaatcccagcactcaggatggcagagacaggtggatctctttgagttcaagtccagcctggtctacagagtgagctccaggacaggctccaaagcaatacagagaaaccctgtctcaaaaaaaacaaacaaaaaaaagacataaaatgtgaagctttcactcacctttcatttaaccaatggaaagaaattattttattatttgctaattttcagtgcttaacagaacacttctagattctctgtttgctacatggtgaatctgggaggttgggactttgatctggtgattgtatgggaagacatggacaggcaattatgattataataaatttacttcagatattttaaattaattttatttaattaaaaaccatcttattttacataccaattccagttacctctccctcacatcctcccactccccccacaatcccctatcccaccacccgtccactcctcaaggaggagtgaggcctctcatggggaatcatcaaagtctgtcccatcatttggggcagaacctaggccttccccagtgaatctaggcttagagattgtccttccataggaaaggggctcccaaagctgacagtggaaccagtatttattcttagtgtatgaatgagcactttagatattttaacttgatgagagttagggtctacatggtaagactgcaaagttagttgaaagtctaaagataaaaatgttggtgcattgaggcaaggtagaaaattcatcctttgaacaaaatcttcaggaatcaggcaaaattattggggccgaaagatatgaccataagaaaccagagaatataaaccagtaagtaatatcaaaaagtgtgaggtaaacatttgagaaaagactttttgggtttagactctaaaataaagttcaaagacaacattcaaaagaccattaatagaggatgtatgcagaaattatgctatttaatatgtgcatggtctccttttttctctacgactacactaatggtactatcagtcatatgttgacaataaaaatcagctcactctagaaatcatacatactatggagattttaagagactaagaataactgattaaatcagagtctaccatattatataagattttccacactttcttttgatttgaccaaatatacattaatattcaggattactaatggtatgacattaaaatgaaaacatcattatatactgtctaatatctaattagtcaggaaaatatcttggaaaaatcactattggtacaagcaatgataagtttatttactggtggagcattcaattaatctatggttttagaaaagttttcaacattcctacttgaacttaggcttgccctatgatatataatttctatatgccaaatagaaatgcacattgatgtataaaagagcaaatgttatgaagcttgagagataacttagctactaacagcattttgacttcttgcagcaaccacataacagctcaaaactatgtttacctcaagttccaggggatttaaaaccttctcataacctctgtggacaccacatgaacacttggtgaacagacatcaaagcaggcaagacacaatgcacataaaataaaattactgtaatagtaataataataataacaacaacatatgttgtaagagtattccaggtaaaaggaaaaacaaatgcccgcctatagctcaatgggtttgttgactgtaatctaatcatacaatgaaatctcccactataccattcatttctataccatctacagcagtcaacttgaatgtttgtgacagagactaatgtgccacagaacctacgatatttagcatctatccttttctagaaaaaaatggctaacttcaggtatagaccaatatttttaatttcaattatatgaaacacaggaaaggccatcacaaatccatgaaagcggatgttttcgatgttaaattttaaaacagctgaaaatacgagtattgtaaagcaaattagtgcttgcatttgaataggtcaaaagaattgagaagtgatttcaatgttcatttcttaaattgagtgttcatggcacagacatagacattttgaaataactcatggagctgtagatttattatggggccactttctatgactttcatcagtaaatcggctcttaaagtactaagagggattatcataattagtcatccttatagtataggatgagaagagtgaattttttcactatacatacttctataaaacttttttggggtttggaaatgcaaaatcaaagctacaaaatagtacatcattaaatataaaaatcttcattgttaaatacttgtctgtttttgtcagcattacctaatacatttagggtaattaagtgacaatcaacattgctcagtatttagggccaacaaaacaaaacccaatgcattgctgctacgcttatatgctatctaaaaagtccaataatcttgtgaaattctcttgctctcttcgtctcatttttaaaatacagtcttaattatctttgtcagactatagctgttctacatccactatcttcagtactacagtgcatgaacatgatggtcttaaccatccccttgagctaattctcctccttctcaacgagataaaagacttcaggaattgaaaatgacattaaaaaaatggggccggcatcgagcaattgttgcttaaaataaagatttaagaaagaagtgttttctgcacaatttaactatggcttgctgtagcaaagttcttttgtgtgatgtctaatacaactccctagagtgcctccttgcaacaaaacaataatgcagaggttttgacaaagtgcccatctccctattgaggggtcattataggataatagctgtctaaactatataattcaatatctagttagtattagaatatctgttaatcagttttggaagctatgatgttcaaaactcagaacaatatgtaaaaccttccttgaccaaagggaatgactaatcttctgtatggctttgataagttacaagaaataggtttatctcagaagactggttatgattaatatgcagttcgtaaagctccttagctctgtatggtctctctctaaccgaatctaataaagataggtcacgcatttttcatattcctttttcacccatgacagatctctaataggatttatatgcatttgatattaattgtattggggactgcaccaactgcaataatccttcacttctttgcctttttaaagctatacataaattacaaaagtttccacttttgtttgactgcagctctttgcaacgatcaaccatattaatgacagagaggtagagaaagatggagaaccaccttacctagttcactgaaaggccaaattagatgaaaggctataaacccagctttgagagctgtttagctaccctctctcttgtgtcagaagagctcgagtatataagatcagtgaaagcctggcactctgaattggtgaggaaaggaaatgcttttaataaccatctcacagaggagtactggcagcaacctgatgaagtattgcttttctaaccatctacagagacaacacaggaaatgtaaagatgagacagagctgcctagaatgaaaaactgagtgtcctggggactcgacctaaaagagcgcttaattttagctctgaactccaaagagccttcacttatttcttggagaaaagaaatgcatcttgtgagactattcaaattaaaattgcagttaagagacatggacaattatattttcatattctatactccccactatgacataaagagttgaaattttcattctgcaaagagaggatagcaagggatttgagaaactaataaaatgttgctttacactctatcaaaacacttagctatcagtgaagaaaatccagtggaaaaaaatgtaggtcacaattgtaatgttctttctacttcaaagagactacacacaaattcagcatgtagacatctctcatagatgtagtcatcttttttaaaaaactaaatggtatgacaggttaaacttgaatgatcatctcacagatttatacacaggggtggcggagtgggacatgtaattattgtccctacattaagaaagtttacttttaaagtgtgacattaaaggaacaaatgaacaccaattcaacagtctgttaattaaagagtaacaagcaaacacacctcattcaatgaaaaaaaaccacacgaggcacttctacttctggccataaacaagtacctgttagtagactagccctccaactgtaaacaaacagaaaatcagagaaaatacatgaaacaactgctttcagacattagacaacaggctgcagagggctgtgatccctgagagaatggaaacaaactaagccagacgtccagtgatccaggctgtgtgtgtgtattttccacagtgcagtgcaaggtaaggacgaagcacagtactgcggcggagctggaaaagagaaatgggagaccagggagaatggcgcagctttgatttatgaagcatagcaccagagaacactactagagacaggcaagacagtctacttgagataatgctgactagcaatctgcacaaatataaatgcgactccattagaaatgggcaaatggctcccagagaataataaattcaactactacagttcgcacagggctgagacatttgtgctctgattagagtgaagagatctcaccaagcctttagagcagtggttctcaacctgtgggttacaactcctctggggtcacatgaccttttcatagggggtcacctaagatcactgggaaaacacagagatttacattatgattcttaccagtagcaaaattacagttatgaagtagcaaagaaaataattttatggtagagggtagtcaccacaacatgagaactatattaaagagtattaaagagtcacagcaatatcaaggttgagaactgctgctttagaaactagaaaaacaccacacttcaagagtgcaactgaattagccatagaacaagtgttattttagattcatacaagcaaagctttaaaacaagtcttaaaattaactgatgggcatataatagaaatttactatttgaggcaattagttcatatagagttgcagcatttaccaagccctgaattaaatctgaagtgtgcttagaaaaacaagagacatgctttaagatacataacttcaggaccaggtagtggtggcggcacgcctttaatcccagcatttgggaggcggacgcaggcagatctccgagtttgagttcagcctggactagagtgagttccagaacagccagggctacatagaaatatcatgtctcaaaacaccaaaaaaataaaggagagggagaaaaatatgcaacttctaatagttaacaataccatattcctatatcccacagctagagaaaaaataatatatttccaaatgagcaggaagttagtcagtggaaataaatgcagacagagataagggtaaagtcatgggcaagaactttaaagctattatttgtgactttaatatttaaagaaaatgtatatactattaagaggaatgaaactggaaaaatatggaatcatagagcagggaaataatgccccacctgcaactaaattccaatgtatgtgtttaatagatgatacactacagtagtgaaaagagtgaaatgaaaataagggtcatggaaagtatcaatccaaaccacacaaaaggaaaggaaagtttaaaaacttaggagaaccttaatgaaaggaggagcactacaaatcagctttctagcttagcatgtgagaacaacctaccttgccaggatatgggaggctgaggcaagagtataccaaatttgaagccagcctcaactatgagcagaatattactttcaaaatagaatgaataaaataaagaaataaaaatataaattgttcttctatagagaacttttctagcaaagtgaagagatagatagatagatagatagatagatagatagatagatagatagatagatagatagatagatagataggccaaccacttgatgaaataatgaaccatacttttttagatttgataaaaatccattaatccagaaatttaaaaatccaatgagcccaaacagatttaaacttttcataaaagaaaatgaaaggcttctttaatgccagtactcaggaggcagaggcaggcagatgtctgtgagtttgaagccagcctggtctacaaagctacacagagaaaccctgtcttgaaaaaataataaatgaaaggcttaaggtatggctattgggggcatgttgccctagcattcctgaagacctgagtaagatcccagcactgtaaataaataaagttacagttatttaacaaaaatattaaaagcatgtaggatgagaatagaagagtagtatccagaaatgatagcttgttacatagaagagaatggagcctaaaaatgatttctgacttttcattcatatcaatgaaagccagaaagaaatcaacacaggaccatatttcaaggatctaaggaaaacatatcactgaaaagaaaagaaaatatgttagaattttgtagctagtgaaatgtctttcaaaggttaagttgaaaacagtacagatgaatacaaatattcaatgcaaaatccaatgcataaatatttgtactatgagaaacactaaagaaagtaggtatcaggaacatactgaaagcccacataaagggataaagcattatagtagggtgcatttaaaagtgaagtatgtaataatattcagaccataacagaaggatccaaacttttggcactggaatataatgttttcatttctacaattatgcaagactgcattcatagctatcctgggatgtgcacagcctatgtgcatgcagctaccatgtttagtttatagtgtttatttttcttaaaacataaatgactaaaaataatacaatgtaccatcaggtatacaagtagaatacataacaacaatacaaaagtcaggagacaggcaaggctccaaaaaaaggcaaataacaccatttaacactagcctattatgcctgccagtggtagtgcatgcctctaatcccagcactctggaggcagaggcaggcagatcctgtgaattcaaggccaggctgatctacaaagtgagttccaggacagccagagctcttacacagagaaaccctgtcttgaaaaacaaaacaaaacaaaagctaacttgttttaagttaaagatcagtattatccacccaaaagtaacctttgaaagccataattaagaagcatatataataaaccaatagatgagcttttattaggtactttttaatgtacaggagggcaaaatgagttaatttagtaagtaatatataatcctacatatatacaagactagtaactgttttcaaaaaccagaagcaataaccaataagactacaggacaaacaggtaaatctgcaattatggtcactgacttgattatgcctcattcaataactgataggcaaatagaaaatcagtaagaaagtgaatgacttgtacattaccaaatgatagctaaaggatgtatacagaatgcttaaactgactacagaccttaacataatgttttcaggaatatctacaacattaaacaaaacagacttcaggccatactatgaaactagcttcatatccatgaaaataacaaagcttttatttaatttccatcattttttgtttttttgtggtgctaatgaaacaaccccctacctagcagaaactcctataagaccaaagagaaaacatggaggtcggcacaagtactactgctgtaaacatcagctgatgtgggagattgaatagcatctacaaaaaaaagttgcttatgtccagaacctacagatgtgatcctagttggccaaagggtctccataaatgtaattatggatctcaaaatgagatcaactttacatcaatctatcactatgttagcgagccataaatgctatgagaactaatcctgttaaagatacaaaagaggagagtctcaacaggaaaagcataagacaatgtgaagttggaagcagagacaagaattgtctccccagacacaataaaatggattttcccttacagctacttctggccttcagaaccaaaagaaaacgagtttccattgttttgctgcctgttagggccaacactagcaaatagaatcccataaatgagggtaactaatatacacatattaaagacacgtgttataacagggtgtagttacatccactgcagttcacaccagcttcaatttgaatggatgcaacttataccttcataggaaaaaagaattatttccttattttgaatttgccatggattgaacaaaaaatattttgctatttgaatgtttcttaatgaagttaaactggtcaactcttccttttacctgacctgtgaggatacagccaagtcagaaatgatactttatgattttttaaaattcatccattcaacataccttaactgaagcctttgtgtctgggtctactcagcattgaggtgctgctacagtgcatgtgatgaaacctaactctcaaggtaaaacttctaagagttggggaccactaagaaagggactatttcaagaggatggagctctcattaatgggaatagtatccttataacagacataaaatgggcttctttacctattctaccatgaggattaagcaaaaatgggtcatctgtgaaacatctttgagtcctcagtaaccaaaaacttcgttgaagccttgatctggactttctaattatcacaactacgagcaacgatttctgtcaatgatgttacatcatttgtgccattttgttacagaagtctgaataaactattacagatatatgaacaacatattgtttctctgtgtttgtaactcaccagctgtcttatatcaacagtttccctctggtttttaaaagcatggcacttaaatattttacagtccaccacattgttttttttaatatactcaaacattatttatgttatgaaagcacctgttacagttgaatgtttgtgtcttccaaaaatttgtatgttaaacccaaacaagaatgtgatttattagaaggtagggcctttgggaagcaattatcttttgattgggtcatttgggtacagtaccggtgatgaaatttagttcatcttattaggaaaataagagatagcaaaaattcttaacattgctatgtgatgaggcactgaaaagtagacagtctataaaccgagaaggtcttcactaaaccatatgtgctagcatcatgaccctagactctccatactctagaacaaaaaaatatttatcattgaaccagacaacatattgcattttcttcccacagtccaagatgactaagaaaacacacacacacaagcatatgtgtatatgcctatgcatgtgtatatctttcatgtacatcttttttctctaaagcagactatacatttggttaagaattgagattccatttctaccacataattttagcatccttactgctatgttttgcacataaaaatatataaaagcacaaaataacacacccgcagatttttccttagccttgatttataatcccctagttaagagttgagaacagggatattttttctgctctaaatttccaactttctgacataacttagcttgctgataaaataacatatggtatggctagcaacagaaaagactgaagtttctattcaagaaacatagatgttttcattaagatgtgaaatgattatgttggctacggggtgacagcagagtaaagtaaattcccaagactttaacttcaagtaatattttctttcctgtatcaataactcactctttagccatgaatagaggaatgtgacaaaagaatacaagaatggcaagcatccttttgcagggtcaaaccagggacttgatatcagatcaggatttgagttctgattccttccacaacgttttaggtaagttcctttgtctatctatctaatcttcatttccttcatctcaaagagtctgaatacaaaaatctgggaggattaaatgaattcagggtaaagggcgggcacatacagcaagtagccttttacaaagttaatttctacttctctaataaaaatggaaaataaaggctatgagcaaggactggagattgtacagtagtcatcagaagtcatcaaacaggaagatcaatggtcttagaatttctatttaaatgtaaaagttcaagttgagtgggtattcagggttacacaaataaaagctattttttatagttataactacagaaacaaaaaaatctacagaaacctaaaagcaaagaaatagttaggtcaattattatagattgggagaatgtatgggatcgtttcccaaagaaacagaggacaattactcaccttcctggaagttctacaagagtgttaataaaaaggacactggaaagaggagctgggggacagggggcagagttctttcttcttttcaatagtacctgcaaccaaactcctggaactctcatgcttttcagctctatttttctttcccctaaactaagctaaaacagaatctctattcacatcaaatggacctctaggtttggtggtggtggtggtggtggtggtggttgtggtactggtttggttttgatattatatttttgaagatggagtatcagccaacttcctaacactaagcaatactatggactattgaaaattatatacctttctatagcttgtcattgaaagacaatgaaaatatgctagtgattgacaatgaaaaataccatccaaacacaaaacttaatattgctatgcccacaacagtaaaatccaactgatgtttaatagattgtgatagttagctttgattgacaatttggttggttatatttaggatcacctaagaaatctctgagtatctgtaagggaatttgggggtaactgaggtagggagacatatactcaatgtgggcagcacaatcccatgggctggtgtcttgaactgaataaaaaggggaaaggggggacagtggtattcatctctttctgctttgtgatttggggtgaaattaagtagcctctcatgcctccactgccaacccatgccaccagaagagacttctaaaaatgtgatccaaaataaaccgttttctaaaattgcttttggtcaggaatttgatcacagaggtaagaaaggtaacacatgggagaagttctagtctcgtttcttgtttttattatacaatgagtatgacacgtatgttaatgcattgttgtttaagtgaagaaatacaaatacaaagaaaaactgaagccaaatgaacacccatcatagcatacacaatgggaagcaaaatgaaaatggaatacaagggagagcaaactctttctattcatcaatgtttctaagatttcaaaaacaggcttgcaagggtcttttcctctaactgaagccaggatatggtataaactggaatccaattgctaaaaaaataatttttattatcttcagtaaaatcctattgctgctgaaactatcactgtgtgtaacaaaactagtttgcataaaaggtagtggccctgtaacagccacattataaaggaattctgcttcagtatattatgtttattcattgacaagtatgcttttttcaaagcaaccaaactcattactaataatttaactaacacctccttggagcctaatttaaagtcactttcatttcaaaatgtaatgaaaccaaaataaaaaacattaccaggcccacacacataaacctattttaaaatagctaaaacttaaataaattaacattgaaatgaacaaactaagtctaagtctccaaagttacattaaatttacatactattgaaattatccttttataacaactgaagtgttaaactaactgcagtgtacactttcatacatatcacaagattcaaattaacaagaatattcaatctaatctgatagtaaaagtagccccaaacctatgttttacaagcagtcccagtttacatgattacacccttaaatctgtttgtaaatcagctgaacataaacacaaacaaacaaacaaaaataaaaacactggtacattttcccattaaaatagtttaaccaatatatttactcaggagatcttgttcctttccccttctggggggatctgtgtatgcctctcttagggtcctccttgtttcctagcttctctgaagttatagattgttggctggttatccgttgttctgtctaatatccatttatgagtgaatgcataccatgtttgtctttctgtgtctgggttacctcactcaggatggtttcttctagttccatccatctgcttacgaatttcaagatgtcattttttttctgctgaatagtactccgttgtgtaaacgtaccacattttctgtatccattcttcagttaaggttgcttccagtttctctctattacaaataatgctgctatgaacatagttgaacagatgtccttgtggtatgaatgtgcatcctttaggtatatgcctaagatagaattgctgggaaatggaaagaactcccatgctcttgtataggtaggatctacatagtaaaaatggcaatcttgccaagaacaatctacagattcaatgcaatccccatcaaaatctcagcacaattcttcacagaacttgaaagaacaatacccaaattcatatggaaaaccaaaaaacccaggataaccaaaagagtcctgtacaataaaggaacacccagggccatcaaaacacctgacttcaagctctactatagagctacaataatcaaaacagcttaatattggctagtccaatggaatcgaatcagagaccctgacattaatccacacacccacgaacacctgatttttgacaaagaagctaaaattatacaatggaaaaaagaaagcatcttcaacaaatgttgttggcataactggatgctaaccaaaatatttaattaccaagtctacacagaaagatatatttgagctataaaaacgtgtactatggtaaaaacaaagaagcaggaattcctgacccctttgcaaatgatggagtcaagataaagccttgtactttgctgttgtttggacgtggtgtgattggggtggaggttgctgtttcagcctttattgccaaagataccaaaaacaacaacagtgcattctatcattatggaagctggttccctgtctgcaaataagcaatcaaatattgctagaagagaacgtggcaagaaaaccatggagactactagtaaatatcaccaaaaacctcatttttatagctcggtgattaaaaataagggataatagtttgcaattcatttatgacagggagtttcccatactggaagccaaaaaaagaaaaaagagtcagcttgcatttgttgcatattctaacatccataagtaactgtctcctatagtaagtagagtaagcctaccttgctgtcttaccaaagtgctggggaggaggggcgtttagacagggagaacaattgagagttaataggtcactgtcaggcacacctgaccttggacattataattccctgttgtaaatatgaacctcttgaactgaagataataatgatcaccttctaagattacttacaataaggacagaatgagatcatccatgaaaaacttgtatttatcacaatccctaaaacacagttttaaaaaaaagtcaggaaacattaccagagagttgcctggcagacaggctgggatagggacaggcttttgtataatgaaacagacatcattcctctcttgtgtcataaaaaacactgccagctcaccagaaacatacattctgggaatatgtaaaaaaaaaaaaatgcttcccctcccaccagggttaagggaccttttatctaatttctagactgaagcacaatccattttcctacagagttttaagatgtccatgcctcatgaaaataattttttaaacaatcttgcaggtagcaagttatttcctttgaaaataaacctcataaatatttatgtgaagtcatgagagaacatgaaaaaatgtgtcccaaattacaccaaatatttctgcaatccttacttgttcacttggcatcattactctgtagttgaacctatgcatgctttttattatattaagtactaaggaaatcaaggatacctatttttccatgagctttcataaagagaaccaagtacaatggggtctttcattccccatacccagtgatccataaatgtatgatctgtatgtgagagcgtttttaaataaaataactaaaagggaagggagagaagcaatcttgatggaaacttttataaaaggtagtagacacaggctatactgctggagagcataatgaatcttctcttgatggcacctcagcaagatcagtttctagtgtttgtaataatagagtaacgcccttcaaaaccattgaaaacagtggggctgcttgtctcttggtacaataactaaagactactatagtttttatagttcttcctttgctgttagctgtcacatctcactgtcaataacatcttttttttttcttctcaaaacataagattaactgggtgaaagcctgagttgacatccgcaagtcactaagacatattaagtgtcttcttgtcccaaatttaagtcagaaaaaagggcaagtaatgttgcaaatggttgaaaacagaattcctgatttaaaaaaggggggagctacgccaaatatggaactgccgtaattgtagtccccaaggcattcatgtaaagccttgaaatcagcaaacatgttagcacataaaactacacaaagcagtaatcaaagatggttttctatcaattaccatggaaatatagatacagatatagatatagatagagatgtacaattttaagaccataatttctgatctatgtatgcgaatccctgagagatagcatgcacacatgcacgcacacacgcacgcagacacacacacacacacacacacacacacacacacacacacctgccttatcacgtgtcctgaggtcatgaaattaagatcttaacattgcagaatatgtgaaattaaaacaacatgccaagactttctggaactctctaattttctttgctttattgttttcttagcttctgccatatgaatagcccaactcaccaaccaaaacaaagaaatttaaagtctgaataaaagtcagtataatattatatggctctaagaaaaactatcaagcaagagtatgtctagctgactatatttgcaagaggacatggagtataagcaactatatttttagcaagctgtaaagctctagccagggcagcaggaagtcaggtatgtttagtgtactcataaagcttaactaaggaattcagcaataatgcaagtcaatgaacaggtacttaaaccaccaaagcattagagacatctctaataaataacctgagaccttcatcatgctgtctaaagattaagcatatgagtgtaatttaaagtacttttaaaaaaaatgtcacacactacagtttaattctcttaccatcgatagtattcacacaaagccatgctgccaaaaaagttcacagaacaagtataagactatcctgtatgtaaggcttgcttataatgttggctattggtaatagtgtgggaaccaggatgtagaatatatcccaggtttcctaaatattaaagtgagggtcactatgtctattgatatgaaataaaatgcttaatgatgaagatctgctttgtattggggaatctgtatttttcctaaaagttcaactgagcacctatataaatagccaaaaacgaaaacaaagtaaaacagcaacaactaaaagaacttggggaactaactttctactggccttccatggacaagacggtcacacaggtcactcacatattgctatattttcactactggggaagagagctttctgtgtaacctctctcaggagtcagacagcaagccaacctacccatggattcctctaggacctgcctagagctcgtcccccttggaatcaagcagtgtctactagactacactaagaatttgtaactgttaataaaactaatccctcactctggtgagtccttttaacacaccttccaatgaggagactgccatggtaacacttatgcctatcatacatgtgattgtgttgaatacatataaaaataaataatgaaaaatgattcacactttgatctggccctgagaatcctttgggaaagcattccaacaagaaatatatgatgactgtagattcaaaattttaattatcatcaactattttccttataaagtcaacaattggttgctggtgatatagaaataaatatatggcccttttatggaagggtttacagtattaaaagaaccctgtgcacactgacaaactatgttcttggaattatcagttcctgaaagttaaaaaaaggaacagacatcaccacattctctgacatgtaatttgacttgcacaatttacatgattctctttggataataacaatgatattatcatctttcaaaccctaagtcatagcagaatcattcactgcatgtggtgggggccttactagaatttatcagctatcaatgaaggtatcgaacccagggcagaatttatttagaatacaaacacaatcctaaccctcaatgatcacacagtctcctaaaagagatagggtagtaaatcaatcattataattccatattagaagtgtgataagcttaaagtaagtgaactgacaacacagatggggagcatgcgacttatcatcttgacaatagataccataaatgttagaaaacaaatgtgtgacaaagtgccaaagatgccaacacccaaaagacagtctgaaaattacatataaggttagtgttcctacctgttatttaaagcagttgtgcattttcctttgagttataaaattagagaggacattttagaaacatgtaagtttacctgatacaaaagctagtattaaataccctttgaaagaagacactatcgttgtaatcaagaacaggattgctgaataaattatattaggatgggtatatagtctcaaaaacatgtcattttgcatttcccctattgaaaaaaacatctaccttgaaagatatgcttcatttttacttggcattatgctgaaaacggggctaatttttcaaacaatttccattaaaatcaacaaaaaaacaatatttatcgaggggaaataaatcttgaaattacttttaatcacttcattaaatttaaacctctttactttaaagaatgacagatgttttcttctttacacagaaatattacactctcctatctttgagggcttcaaaatatatattagttcaaaatccatttcttggttcccactgagatttaaattacctgaaactaatagcctcactgcaagatttctattgcatggcttgtaagttgaattcaccagcatgacatctatgttttatatatgtaaattccacaggtttactgtaaattcatgacattgactacagtggtttcctaaaagcttggtactgccactgaaacaaatacacaaaatgagacaggaagcatccataatttttcttcttgcctattttattgtggcaatcatggaaagaatagagacagtctaaagcacaaaaaccaaaatagcagctgaaagcactataaactatatgaaaaagaaatatttgcatataaatcaaaggaagcaataaggcttacctcatggtacataataaaaaattattttattacagaagctactgcctgcattctagcctcgattattacattttccaaaatttggcatggacaatatgaaaagaaaatttactaacaataatatatacagaattcaccaggtttttcctttacctttttaattcttcctaatgctataagaatcctagtatgcagaacaaaacataactgtgagtgaagtaacaggattggtgtcatcaggcaaaaagcacagcccagggagatatgtttcagctctgggccctctcagatgtaatttctgcaagtatttatttcttatgttaactaactatgcaaataacaatgtcattgttcatcagtcctatctgccaccagttactctcagaaaatctgcttacaatcatagttatttgtatagatataagtaattcccggtgggaattacctgaggcccctgtctgcacagcactttgattactcccaggtaatcaggtaagcacttaaaggcagacagcaacttcttcagaagttgtcaaggggctatttaattcattgcaactgccaaattcttgatcactaccacaataaataacttcttttatactactgaaggctgtgaagtttcactgatggcaacagaatttagtacctttctataaaaagagccctgtgggtacaatggtatcttggatcaattggtttcttcaactgtctttaaagacagagattacttcaaacttgtgaaaagtcatcacttgactcttcctctccttgttttcttgtagcattcacggattttctcttcagctcctctacttgcttcagcaattctagtccatccttgtgctctctgatatattcttctatttttaattctctcctttctgctttcctgaccaagagaacctgaaactctagggtttggcttgtgcctcccatgtgaagactgctatgtttgaatatctgccactctagaacctatgttcaattttaggtgttcctctgaccatgattgacagtgtaacctatggaaggtgataggtccatgagggttctgccctccttggtgggatgatactatgataaatcagcaaattcatcctcctttcacctctctgccctttttctttcaggtttatgagaacaattcattctgcctctccagaagatgcagttagacggtcacataggatgctagcattttaatcttggacttcctatcctccagaacaataaaataactaagtttttgctctttatgaattactcatccttcactattctgttattgctgcaccaaacagaagatgtcaaaaacatgtgtgttgatgtcccagtgtttcagtctattttctcgttgctttgacaaaacacataacataggcaacttaagggggaaagatctattttggctcatggattgagaaggcacatacagaaaagataggtgactgtagtgatgggtctatggtaatgaaagcatgaagcttcttgctcacatctccatgatcagaagacagaggccgcaggctagatggtgacccaagctacagcccagaagttctagttcactcttctcagcagctcattttctctagaaagactccacatcccaaatgttgcataacattctaaagcaaagcctcgaggcggggaccaagtataccaacacatgagcatgtgatggacaccttacatgcaaaccataaaagatctccattcaattatcaagctcatagtcactacctctacagataattagaaaactcctgagctaattgggagcatgagggtagaggagagggagctgccacaataacagcaggagaagagtagtagaggaaaggaaatggacgagcagaaatatgagttgggggaagaatagaggagagagagcaggatgagagataccatattagagggagccactataggttcaagaaaagatctggaactagggagatgatctgcagagacctacaaggatgacatgatctgacaatccaggcaatggtggagaggataacctaaaagcccttcccctaaaatgagattgatgacttctctttatgccatcctagagacctcatccagtggctgatggaagcagagacagacatccacagatacacactgagctgaaatctggaatttaattaaagagagggaggaatgaagatcgaagaggtctgtaccaggttggagaaacccacagaaaaacttggcctgaacaagggagagcacatcgacaccagatgctgtcggggaggccagtacaagactaatccagacccctgaacatggatgtcaataaggaggcgtctgcactccagggagtctatggtagtagattagtatttttcagtggtgtaagaagggactttgagagcccatcccacttgaagggatacattcttgccctggacacatgggaatgggcccaggcccagcccaggaagatttggtggactttgcagagcccctgttgagggccctaccctgcctgaggagtggtgggtggatggggtaagtggtaggttgggggtgggggaggaaggatgggggtgaggggagggagacggagaagggacttacatgtgaaacaagcttgttccctaacttgaactaataaaaaaattaaaaaaaagaaaactgataacagtttctccaatttgcatctgctactaatggctttgatacatctacatgctattgatgccaatgctaccactgaaaacctctactcttaatacttcttagttacttgttttgttttgttttgtttctatccaaaaaggaaagagttctggcatcagttaccagcctgctcatgcctaagctttatcaccaaaccagtaacatataaatacgtaattcctaattcttactagactgtgactgagcttcacctcattcttctcccatcttgtcctattttagtcacaactcacacatgcaaggctttttcctctacaatgtcacatcctcacacacatacgttcacacacccttcactgtatagtggtatctgttctgaatgttttaccaatatcaccgaatttacccttggtttgctaagatttcactgtggtctgattttgtgcatttgtcatgtaattctgtatcctttgcaggaaagaaaatactttaggagaatttaatctaactgtatttttcaaataaaatgttacatttataaagatatattgaaacctagagaatcatacctatccatcactagcatctacctgagaggacaggaactgatacctacctagcaaatatacacatgaacattctagtctatcacaagtccaagtaaactttcaacttgaggaaccatttaacctttttggttcctactatgctcccaatatctataaaagtacctggcacattcagaaagtactaaataaatatttttaaataaatgactaacaaaaaataccgaagtcatatggcttatagatcattggataactacagacaagtcatagaagagtcacacaattgaaattgggaatatgtatgagcatttatatcactgatgaattgaatacatttcaataacattaattttgtttcttagactataagtctatgggctgggaagatggctcagcaggtaagagcactttctgtgcaagcatcaagacctgagttcaaatctcaactattcatgtaaaaagttaagtgtattgatatgtatgcttgtaatctcagggctgggagtgttggggcggggagacagatccggttgaaactactgggagccctaggttcaattaataaagcagagaatgacagaacaggatacatagtatcctcatctggcctccatgtgcacaaacacacatgcacatcaacgtgtgttcatataccacactcacacatacacaccactgaaaaaactatttcaataaatacagtatattacatcttaattttaatttcatctctttccacttgactgttgctcaataaaatatttatacttgagctattctgcatacacacaggacactaaagaactaataacttacattaggaaagtagctcagtggttgagtacttctactgaatggacaaagccatggattcaattcctagtactgcataaaaaataacttactgatgattgttcattatataagggaattatctcgtgtttaccttacccataaaaatgcttatctatgcttctgtaatttattttcttaatactttttttaggaaaatagtttgaacataaatctgaaggaaaagagaaaatgtgaatgaaaactaatttaccttaagagagagcaagtaactcttacataatgaaacttcaggtatattttatcctaattactcagattagcataatctaaaggacagaacccaagacagacaccctaaaaagaaaagtgaaagggtttaaaatgaaccagtcgaatgggtcaggtaatgatgacactctctattagaaggaaagaaatggcagtgctggggaggtaattttccatcagtttggagtaaacagaataagggctctgaactttgggctaaactttaagtagagctctcttttgtaaacataatttactgagcatggctgcaaatgtctagaatgaagaaactgcaaagttctgaataacagaatgtagtgtttacccacattccagaaaacagcactgcagattacatttcaaaaataaatttgggcatatttgtaaattcatgcttgataatcagaatgacaaactcttcttaatgtctagacagtagtgaaccttgaacaggaagatgactgaaaactttactcattcagtagtgagaattctcatgtccaaagaagatttttctaagtaaattttaactggagatcgtcactgtaagcaaaataacccagaatcacaatcacaaacattgactgctttgtctcatatatggaaaggatgtataaatataaaatacatatgaataagatacaaaagtaaaaggcctaaagggaagaaaaacaagagagtaatggtggcaagaagcaaaatattacatattttcgctcatgcagaatctatattgacaaaaagttaatacacacacacacacacacacacacacacacacacacacacacacacacacacacacatgccatgcttattttcctctctgttgtnnnnnnnnnncacacacacacacacacacacacacacacacacacacacacacaccatgaaaacataaggtaaactatttggaggaaacaagagaccagcaagagagtgatgaatggatggggaaggacagtattaggtgacaaagatgagcaaggggtgtatgtatgtgtgtatgaaatgtcataatgagacccattgttttgcaaaccaactacaaatcttaatatagtcccagttttaaaaggagaattttgccaggcatgaagacacactcctttaatcccagcacctagaaggcaaaggcaagaggatctttgtgatttttgaagccattctggtcaccataatgaattcaaggacagctaggactccatagagagaccctgtctcaaagggaaaaaaagtagaatttaatacttaaaatattcaaaaggattttgcagtaacccatgtaagttccatttataactacaatgaattaatgtttcaagttgggtcttttgctacctcaagttgtgctgtgtacttgtcgaatgtttcatgtgggtgactatcagaatggccgctggattaaagataatatacactacaaatgaagcatacattacttatttaatttatttatatgttatttttagtaaaaacatgaaaggcattcacagactagcaataagttgtggcagtgaatttaaataagcaatgtatgagagcataatgattatttttttaattcaaacaggaaggggaggttaataaaatcctattttacagaagaatgccatataacaaatgcaaaaataaagacaatatcagaaaatcattttgtagcaaagcaagtaataaatgacttggagcaagaattccatccacaggtgtgaaaaatatacaaaatgttgctaagtaatagtttacttacatgatctcaaaacatcctatttatcacttattaaattcaaatataaaggacacttactcagcacttatgatggggcagcaaatacccatatccctcatgataagatgctctaaggccaagaagcacctatgtaaaatccttactaaaaatatttgccctaaatttaatcatgaagatacagataaatcaaggctgggaaacatttttcaaagtaactgacttggtttcttcaaagtcttaacaaaaacatatcgaatgcatccaaactgttctagattgaaggagatgaggaagatacagacaataaagtttaatctttaactgtactgtaagaatataattataatgactactaagaccgttggggaaatttgaaaaatgggcatagttgaataacagtatcatgtcagtgggggaaaataccttaaatttgattatatgcactgctgatgttggagaagttccttgctctttggtgatacatgtttaagcatgaaaggttgaagtataacaaatcagcaacaaagactccaaaaaatggaaaaagaaggaggaggaaaagactgaaaaagcaaatgtagtataatataatgctttaacaagagactgagtgggagctatattcattgtagcattgcagtgatctggaagccctgaagtaagtaagaaaagttggcagggagttccttacatattcataaaacagaccaaacaagtaactatagaattatcaatcaattcatttaatcaaaacattatctgccaaaattccaatctcattttaactcatttcaaaagtgattaatttgttatacacaaaaagcttagaaaatattttgggtgattttaatcaacttcctgaaatgtgataactcaaaaataaaattagaattatgcatttgtgtattcacatacaatttgatgtgacattttataattggactacattaaaaacaaaagcatgaaattgttttagcagctatttcagcctagtcatctgtttaatacaagtaatttttccaaatgaaaaccttgcttcatttggaatagtaattcagcagtaccttccccacaaacaaggaaaagcagggcttgccaaattttgtcaaactctttgatgcatttctgctattacttactgaccccatacctctagatttgtcttcaaattacttgtgccttgtaaatatgaaaatttacatcttgatggcaatgtgtttcattttaattcaacaatagactaggaagcatggcaatttttcatcaggtttctcaaactatacagaaaaatacacttaaaaacaaagatggaccatagctattcaaatactcaacttttccaaagataaaatcacgccatcaccaaacaaggagaaaattggttctggatattgagttttcagtaactgtaattaagggattcaagggtgcctgggtttattacaatactactttattatcaaatatttaatctaccaaaagtattttatcagtttatatcattataaagtaaatatgcatttctgaaagaaaactgtattgactaaaaattagtatcaattttaataacataataatgcagcaaagaaatgactgtgtataaataaatttaccaaaatataataacacttcatataaggggtataggattgtgggtcatttttaattcctattccagtttgctaaatgttgttatgataaacaccagaaccaaaagtaatttcaggaagaaagggatcatctcctcttacaggttatagtttatcatcaaggcaggaaggaacctggagacaggagcccatacagaggccatggaggaatgtggcttactggcttgctccttgtggcttgatcagcctgcattcttaaagaacccaggactaccagtccagggatggcactacccacagtgcatagagcccttggacatcaattaggaatcaagaaaatgtcctacaggcttgtccgtaaggggaattttctcaattaccattccttcttcccagatatgactaggttgacaaaaaagctaacaagcacatttccctttttcaactccactagctttcagataatgcactgtttttttaaggcagtcttttaaattaatacacaaagtagcatgtttcattttcacacttttgtgaatatatgccagtatgtattttttcattccctaggctcattttccctctcttcctcgtccccatcttctcatcgcaattacattgcccttacaaagaagaaaggtaaaattttgaaggcttcttttaaatcatgtatttaaaagaatttggggcttttatacttatgttcctttttaaaagagggaaaattcttaactactaccagaaatctgaaattactctgtcagaaactttgtcatttctcattttctatgacatcagttttagaaagttattaaacccctaatttatggagtattataagcaaggagttcagactaaataacgatgccatggctgcacagtttaaagatgggtatttttcatatttagatgccagattaggggatgacatccatagttgcttatgccttttcataaagaagcgacagtaaacataatctttagccaaagagcaatgtcaaaaatgtgagattttacaaaggataaaagcataattggcttctaaagaagacactaagtaatgaaatgaatacataaatgcattatcagccagcacttgtagttcaacacatttcttttgaaatgtgtattaggaactaccatcagaattatctctttaactggttattactgtaatggcttaatatgtagcatatttgacagtttacaagtgtttcataactccatcagtatagcaaaatacacatggagatgtggactaaagaaaaattagtcttttagcccaagtcactgtggcatagaaaaagtaaatccctgacaacaacaggtcttcaaagtccaagagctataatttttccagttaaacatcaactttgtttaattagcaatatttaaataaaatgctaatgaactctcaaaagacaaggaccatgtattagcatgcattagacataatttaaatactgttggctgtaacagaaataaaataatgaagcatccctttgttcaactgttataatttctgcattaagcattcattttgtatggaaggtttcctgtaagtatgattcactgtgtacaacatgctgtgagcaaacacaatcggagaaagattctaaaggaacaatcaggacgcttctcgctggtgtgatgaagagctagtttgagagaatgttggataatgggacaagaatgacgtggaaggtggacccttcccaatattcttcacccacatctaaactgaagaaggagaacacttacatagacacatctacactctgagcgaaagaagaaaaagaacatcgagacagggtgggttacaaagaaatacttaacagttctgaagccccaatctatagactgtactcccaccaaaaaaaaagaaagaaaaagaaacaacagtaaaaaaaaaatgacagctctaacaggataacttgaattagaagaagctgaaaggccccttaagcctacaagtgccctaggagagttcatgtgtaataatgaacaactttcttcagtgtagcagaaaaggttatcaagaagaaagatatttcattttttctttttattctaaggggggaaagagatttttatgatgctgaacttcatctgcaaagcatgagcactgtttttgagaagcattataaaataactagaagtcttctgatttcagttcatatgcagtcaacttcacttgagttataagaatgcagtgaatgaacagaagttactaattattttattgctgttacaggctagggtatttgaaaatgtctaaggtatactaagacatggtccttgacctctgagagtttataagcattttaattaaatgttaattaaacaaagctagtatttaattgaaattaattataaaaggcaggagtacataagataggtgaacatttattatataaaacgcaaaaggacaatgttttatttctttcagcatagaaaaaatggcttcaaaaacttattgaccaatgatagaaatggaattgcttccagcgtgtatttttggtccctaatgcaacagtaattttgcactttttcctcccactgaagttgcataacatcatctgtttacatgaatcaatgttgccaatttgcaaatgactactccaaagcacaaagatcattcttgctcaatcattggggcccacaaaacaacaggtgcaaagaggtatttcattccataagatgcagcatctcctgcacagtatgaacagactagaaatggttccaacagatttaagcaatgaataatctttaaaaatacatgagatatccttgtcttgatgtattttgggtcttgttgttttgttgcataaatcagctgggcaaatgctttaccactgagccaggttcccagatcctctgcatcctacccaaaacaagtctaatacacaagcttgcacactgttaaagcattagaaactgagcaagtagctagtcattgcagtaatgaatgtgaaattagtgaagactaaaatgagtgctttaatagtgtttgtgcagttctttaaaagatcacttattatatgccaccactcaatagtctcgggtcttcttttcatcttactaacaaatgagtttttctactttatagttaaaaataatgacattgattatttttattctgatcgaatgcagatttttaataagattgttaccaccatcaaaactaaatcttttacagtagcaactattctacaatgtctaaatccgttagaaaaacacaatcaacttggaatatgagaaagcaatgttttatcatcatgaagtaactacttcaaactccaataatcaatgttttgtctcccccttctggactacctaattatagaaaggaaaaaataggaaaataagatttaatctttcctcaaaggatatgttcagaaaattggcgtgactcgggtatattgtcaacatgaagaaatcattgaggtactatactgttaataaactaaataaataaatattaaatgtaaaaatagactaacagcttgacagctcacaaaagcatgctgccatgcttagcaatactttatgaatgctactaataatagagggtttattgccagatgcatagaaagaacattgtaaacttacttagaaactggccataaatcaatcactcagtctccatctcaatgtctctctcttgctgtcttcacagtgtctcaaactgtggtgcaggcttagccttgagttcttatggctacttctgcattactttctttaccatcctgaatcctagagacctaccaggctctcttttggaacaaaaccctgtaaatcactcaattaatggagacaattctcataacctgattaggggcaaaagtaacacactgagccttcactacgatgagcttgtcctttggactgagattacttagaaagattacaaaaggaaaaaaaaaagtcaggttttaaccatttgagatcgcctatttgaaagacaacacaccagactaggaaatacgtgttgccttctctatgctaacccaccgagtcactgaaatgcactcatgtcactcctgacttagtaaagacaatagagcttcagtttatgagctagtgaaatatattcaaatgataactgatctcttctcatcagcaaggtacagaaagtatattttaaatagcaaaagcagcaatctgcaacagtgagccccattataaaaatcactctgttaatgctgtaaaactaaagagaagtccttgcatggccagattttacttctgcttttgtggtctgagccatttctccttgatttacgtgtctaactgaactcatcatcttggactccaaacttggtcttgctcttgacttctgtatgaatgctcaagtcattttaatcagccacgcttgaaatttcagtcattattaaggcacacatctcctgtgccctttatattcatttgctgagactgatatagttcacatccagtcttccttacactctcgtctataccctccatttagttcctactaactacattgcagttcagagtcatgacaaccctgcagaaaccacttgcttgagctctcagtcctcagtctctaacctctccaaatctactactgtgagtcctccacagcagaaacctctgattctgtcattccaagtctcacaaactcgcagggatgcccaatgactactcaactggcaagtctttcatacagttctcctaaaatgacctcagcatacctttccaagtttagggacctctagctatacttaagtgtatgtgcagccattgtaactagctcttagcattggttattaaaaaccccttcctgtcctttgcccatcccatgctacctacccactgtgtcctcatttctatccctcaaacattccatgccccatcttgcctcaaggctttgcacttgacattgtctctggcttcaaagctcttccctagatatcggcatagctgtctccattttcactgagttctcacttgctcacatagctcgcctgtttaaaacagtatatccctgatcactgtgcttcctcctcttgctctctttttacatttttcctcccatagcacttgccaaaacctgtcataatatttgatatgtgtcttactgtctgttttcccaactaaaatgttactgctgtgaggacaacctgtatagtttatcatgctaacactacaaggaggcctagaaattacgacctgtgtatgtaaattgtggtcctcagctccagctttctacaggtcctgtcaaggtagagtggaaaaggtccattcaccagaaagactgacctgccagttccctaaatgggagctgaaggcctaggtctatatgggcatttccaggcttttgtttcatctttccctctaaggcataacactgctaaggaaagggtggagacagaatgaaactggctctctctcaccaatattggtataaaaggggaaacaaaattatttttccactttcatgtattttgtggccttttgtctgaatacatacatgtattagaatgcaaagtcaggcattatggtcaggagctctggcaatattaccaagaacgttgcctgatatatgacaggtacctaataactctgggttctaaaaagaagtcattgggtgtggcagggtatgcttgtaatggcagtgtgtgagagatcaccacaggaagaggagaagtaaaaggccagccttgggtacatgaaaccctgtatctaactgtcagagaaaatgaatgcatgctaaattaggcattttttcttctgatagaggatcttactgtgtagctctggctggcctggagctagatatgtagaccaggatggccctgaactcaagacactcacctgcctctgccttatatgttgtgaaattgagcgccttcaccaccatgtctggccataagtcagctatttaaattctgctgtttccataggtaaaacaaacactactaaagtccctgttgctgccctagtcattgatctatttattatactaaagttatctatgtttaaccctataaggtctaatcattatagttataattttatgtgtttttttattatttgacttttattttaattagaaagattattttacatgttaattccatgtccctctccctcccctactcccctgccacccccaaacttataccctacctatcccatacctttctgctccccagggagggtgaggccttccgtagggggtcttcaaaatctgtcatatcctttggaatagggcctagacccacccacttgtgtctaggctcagggagtataactccatgtgggatgggctcccagccctgtgtcctgtgtcagatgtggggatgctgaacatcttttcccaatctgtgggctgtcattttgtcttgttgactgtgtcctttgccttgcagaagcttctcagtttcaggaggttccatttattaattgttgatctcagtgtctgtgctactggtgttatattcaggaagcagtctcctgcaccaattcgttcaatggtgtttcctactttctgttctaataagttcagtgtggctggatttatgttgaggtccttgatccaattggacttaagttttgtgcatggggacagacatggatctatctgtagtcttctacatgccagcatccagttatgcaaaagtatcgtgtataatcaggtcaattgttcctttttccttatagaagaatgcttactttttttattagttcaaattaggaacaagcttgtttcacatgtcaatcccttctccctctccttctcctcatccacacccctcctaacccaccccgacctaccccccacccaatccaacctccactccccaggcagggtagggccctccacaggggctccgcaaagtccaccacatcatcctgggctggggctggacctttcaccatgtgtccagggcaagagtgcatcccttcacgtgggatgggctctcaaagtcccttcttacatcagggaaaaatactaatccaccaccaggggcctcctagaatgcaaaggcctcctcattgacatccatgttcagggatctggatcagtcctgtactggcctccnnnnnnnnnnnnnnnnnnnnnnnnnnnnnnnnnnnnnnnnnnnnnnnnnnnnnnnnnnnnnnnnnnnnnnnnnnnnnnnnnnnnnnnnnnnnnnnnnnnnnnnnnnnnnnnnnnnnnnnnnnnnnnnnnnnnnnnnnnnnnnnnnnnnnnnnnnnnnnnnnnnnnnnnnnttccatcagccactggatgaggtctctaggatggcatgaaaaagtagtcatcaatctcattttaggggaaaggcgtttaggttatcctctctaccattgcctggattgtccattcatgtcatccttataggtctctggaaatctccctagtgccagatctctccttggacctaaaatggctccctctaatgtggtatccctcatcctgctctcctctattcttcccccaactcagtatttctgctcctccatttcttgctctcctctccccttctcctgctctcattctggcagctccctctcccctagcctcatgctcctaattatctcaggagttcctgccccttcccattcctggggtccatgcatttatcctctagagtccttcatgtttcctaatttctttggtgaagaggatcgtaggctggtaatcctttgctctatgtctaaaattcatatatgagtaagtacataccatgtttgtctttgtctttttgtgactaggttacttcagtcaggatgatttcttctagttccatccatttgcctgtgaatttcaagattccattgctttttttctgctgagtagtactccattgtataaatgtaccacattttctctatccagtcttcagttgaggggcatctaggtggcttccaggttctggctattacaaacaatgctgctatgaacatggttgaacatatgtccttgttgtatgaacatnnnnnnnnnnnnnnnnnnncacccaagagaggaattgctggatcttgaccagtaggagttgctttgccctcatagctgtctgttttgtgtcgattatttcctgtccttgtcccctcttcctcttctgactgaatttcttatcaggcttcctgttctgcgactaggataaatacagttgcaacagttggtgaaatctcaaagttttgagagccttaaaaacatagcccatctttccttcagtcatgtctcaggtggctgaggatccttgggacagttgaaacccggggaacttctgaagttaccgggtgctataggtctgtatatatttttcttgtttgtgtgctgttcagtgtcatttcttcttctagcatgggggggggggaggagtcctctgtcgtgaattgggtgttttgtagatgaatcctgtcagttggcgaagatcttttcccattctctggactgttgttttgtcttactgaccatgtcctttgccttacagaagcttctcagtttcaggaggttccatttattaattgcagatttcaatgtctgctactggtgtaatgttcagaaagcagtctcctgtgccaattcgatcaagggtatctcccactttctcttctagaagattcagtgtggccggatttatgttgagatctttgatccatttgcacttcagttttgtgtttggtgacaggtatggatctatctgcaatcttctccatgtctgaatcaagttgtgccagcaccatttgttgaagatgctatctttcttccattgtatagatttagcatctttgtcaaaaataaggtgttcataggtatttgacttttattttaattagaaagattattttacatgttaattccatgtccctctccctcccctactcccctgccacccccaaacttataccctacctatcccatacctttctgctccccagggagggtgaggccttccgtagggggtcttcaaaatctgtcatatcctttggaatagggcctagacccacccacttgtgtctaggctcagggagtataactccatgtgggatgggctcccagccctgtgtcgttgggattttgatggggattgcattcactctgtacattacttttggcaagattgccatttttactatgttgattctacctatccaagagcatgggagatctttccattttctggtatcttctttaatttctttctttaaagactcaaagttcttactgcacaggtcttttacttttttggttagcattaccccaagatattttatattgtttgtggatattgtgaagggtgatgtttctctgatttctttctcattgcatttatcatctgtataaagtatgtctactgatttttttgaggtaattttgtatccagctactttgctgaaggtgtttatcagctgtaggagttccctggcagagttttttgggtcacatatgtagactagcatatcatctgcaaatactgaaagtttgacttcttcctttccaatttgtatacctttgatctccttttgttgtctgattgctcaaactagaacttcaagtacaatattgaagagatatggagagagtggacagccttgtcttgttcctgattctagaggaatcactttgagtttctctccattcagttgatgttggcttctggtttggtgtatattgcttttatcatgtttagatatgttcctgttattcctgttctctccaagatctttatcatgaaggggtgttggattttgttataggatttttcagcatctagtgagaagatcatgtggtttttagaagaatgcttacttttatgtgtgtggataaaggattcctggcttgcaggaaatcaagtcaattatctaaatctgttttatttgaggtgtgattaaacaataaaacatattctaccaaaacacaaagttctaccacatttattagaactagaatcccccaaattcatcattcagttctacccagttctacctctatttgaccccaaattctctgcaacttttagagaggtaatggaagacattttatcattttcccatcatagacagaatctatagaaaatcttcaactattttagtgactttaaaattaatgtgtcagtattaacttgagaccacataggagggtttctattgtttttgttgttgctgctggtgttgttttgcatttttctcaaagcctagcaataatacacaccaaataacatacagcttccaataaagagataaagcctttttttgaattttcagaaaaatccttcccaccatttttttccgagacagggtctcactatgttgtgaatacctggctgtcctcaaactagcactgtagaccagggcagcctcaaactgtcagagatccacctgcttctgtcttctgagtgctgggataaaaggtgtgtgtcaccactgcctagccttcccatcattcttgaccaagaaataattgcacccatacctttaaacctacaaacagcatatatcttgtatgcttagaaaaaaatacttcatgatcttaattttagtttaaaaagttattgctatgttttatactttcaaaacatgtttacataacaatcataattaatgaaaggataaactggacatatgactgaagtattatagtttgagtatattaaatacaaatagtccactgaaacctatcctgaacttagtattttcatttcaaaatgggaagtctgaagttcatatatgatctgtaaattactcaagatcatacaggccttatgcaccaacagagtctgaaactggacccattttcttataaatgtatgacttctataaaacatagaatctgtcctgtggacgcagaaagacaaacccaaacaatgaaagcacctactgttcaaatatgtaaattgctataaagtaaaataggaatgtcatttttaaaaagcccttggggaatatgtaaagtcatataaatcaacaaatagaaaggaacaacatgtgtaaaagaaagagctacaggaattccagtaaggcatccagtggaaatgggaggtggtctggggagtcagaattaagtcaggctttatgcaaaagatgtggagtgaatatgggcaagatattcatacagccagaatcagtatgacctgaggatgaggttgtagttatatcccaataataggcagcttcaggtttgttttttaagtaaactttataaatataaaaaatgaaaagcaacagcaatggtaaaaaaaaacagcagcggggcctcaaatgctattatttcagctcgcaatcagtgttaaagaaacaaaagagaaaaggccatgcagacctacttcattgtatattccatttttccaatttcattccagcttttccaacactcatttttaaactaatgttaaaatctctaagtaatcacaatacttaaataggttatatgagaattctactgtctatagcacctctatgaaatttctacctgcctattttaccagcaaatatactcctcccaccttttggagattaatgagcctatgacacataagccctttgaagctgtcttttaactcgggtgattttatatattgttggttcatctctctctttagttgcaaaatattaaataaagtaaaataggacaaaacaaatctccataatgcatacctcctgtttcaactttaaattaaaccttcctcatttcctgtagaagggattactatagtttacttcttggcaacagaagttgacagttcaaatgggcaaaaaatggccatgaaagaagacatactctagatctatccatagaacttaatctcaaagcatcacctttgaacaccctctgggatccatgcacagctgctagtctctccatctgctataacaatacagcctcttggggacctctatctgttaaatatacttgtctgttgtcatctatctttttcccctttagactcagtttcttgaaagaaaaagctgtgttgatttgcaaaaggagacaaggaagagctttattctaaaatgttaaaaatatggtagtagggcaacagggaatggaaagactgacatgggagagcttctttctgcaacatgaaagttaatcaagatggatacttagaagtacttgctgggccaccaaagaagaaaagagtattctcttttcttgcttgatttagaaggattcaagaaaaaaaaatatccttaggaagcgtcaagggtacctgtcaggataaacacagggacacagctaaagatgacatttttaaaaggaagcctaagatcagagagatagctcagtggcctggcaacctgagcaaaatccccatggcagaatgagaaaagtgacttgagggagttgtcctctgacgtccatacatatgccatgaaatatatacatgtacacacacaagtaaatacaatattttaatgaatcagagatgagattataaagggaaacagagtcttttttggttttttaagacagggtttctctgtggctttggagccgatcctggcactcgctctggaggccaggctggcctcgaactcacagagatccgcctgcctttgcctcccgagtgctgggattaaaggcgtgtgccaccaacgcccggaaactgagagccatttgaagattttaaagaggatagtaacatgttcctggtaaccacatataacatctcccatggaggaagaggaaaggagggaataagtaaggaacttttacaggtacagtaaacacattgactatactaaattcatcatttctctgtgatttttaaagatgcttcatatgctatattctccaaataaatgacatatactcaaggagacaaagtaattataaacatctctgaaatacaatgcagggaatgtccagcttgttatattacaactacaataccataaatatacaatctttaaattgtagcaccaacaagaaccttaaaacataagctgaaatttcaacttatctacttaatatctgaagttcagggaaaaaaattactcaccaaatggcagagtcaatatatatcatcctacaaagccagatcttcaggactcctaactgaatagcatcagttgatatgaacacacgtgcacagacacacagacacacagacatacaaacacacacacacacacacacacacacacacacacacacacacacacacacacacacacacacacacacacacacacacacacacacacacacacacacacacacacacacacacacacacacacacacacacacacacacacacacacacacacacacacacacacacacacacacacacacacacacacacacacacacatcaatgatgcccaaaccaaagacagacatcaaaataagaatttgtgtaaacagaagaccaatattttaggaatgccagcacacatacacaaacactctgatcccgaaaaactgacatacaccacacaatttcacccatgttgtctaaaatgacagacatgattctccaagggggaaaaaactccaagaaaaccaaggcatattctagttctaaaatatattacaaaactgtaagaaagtacataaccaacctaaattgtaatcactagatgtcaatatttgccttaacactttggaaaaatatacatcaaacaaaaactaaacattaattactgcatgcaaaaaatcacaaatttctgaaacacaaatttagtactaaaggtaaaacatatcttttgtacttaccgtaactttacttccaactatctgtatgcagtggtcaacggagaatggttacagtgtgaaaaaaaacaaacagcaataatattagtaatcagaagctttgaaagaaggtgtttagtaaattagtcactagtctactctagtaacaaacttaaaacaagatagcaatattaatgtgtgccatttctaatatagagtttacacatacagaaaaatgatcatgatgttgtagaattgtttaaagtctgcactctaataggttttccatgcattacaatctaaatataaaataaaactccaatatacactcagataatttccctactcacagccactaaaagaaattaccagtaggaactttttccaaattttgctctcgttttctttcctagctatggtaaaaatagtgttaaggtcagggtaagttattttaaatgacaaatgtttcatttaaagtcatgcatcaagttctgaaatgaacttgacttgaaaactgaatgttttatattgttacaaatttaaaatgtacaatatcattttgacttatacttttaaatgataagacacatttgttattatttttttctgggtcatcatactgttccaagtatgaagtcagggttctctatatgatgtgaaaacaatgtattttatccataaaaatgcacatattaatatggaggaaacagatcagaaatttcaagagacgaagcaatttctgagaggcaggactgtgcttaagaaaacaagagggaactctcaacataaacatattcttatgccaatatcaaaatataagtccaatcactgttatcagattctcacacttgaatattaagcattgtatcaaagagagctaattcatgattcatgtgataacagttattatcaatacctattgtatttttcagctagtgctttaaaacaaacatcaaatttaattgaaagccaagtaagtatcctcagctgactaaaatactacaagatacaaaaagataatggtggctgtaaacgatttcagaggaatccccgagcctccaaatgaagaagcaagttccttaaaaattcatataacacgctatttacaagcagtgataatttagatgaatagaagcttctttggtgtgactaacagtcctctgaaatgaaagatatgctattgacctaaattatttcctcccaccaaagaagacagagtttatatttgtcccttgtttccttagcacagacgtgagaccaaaaggaaagaatgagagcctgtgttaacaattaatgcaggttcgtagtcagtgaaacaactaaaatgttgcccattcaaggtctgttttaatgatttgatcagattgcaaaatgatttcatttagctaaagcacacagagaaatatattagattgattagttaagagaaccaaggagaaaaatgtttggtcctatctgggctcaactgtttctccttatccatcccatgtatgaaaaggacctgaggaaaaagtatctgaaaatggcaacaacacagccacaataagtgcatacatattgtcatgtgcaccgtagctttcatctacttgttttattggttaaatctacaaatttgagacacaactgatctaatgatgttggattatgtactattgagggtttggggggaataattacacctctgaatgtctcacacattgtcaaaagtgtaatctgacatgtcctaaaatctaaatttcagaaggtataattaaaattagaaataaactgcttttttcatattgtcgtaaggataatggtgtgtgatgcactaacattaggtctctggtggataacatttcctaatgaatgtctacatactctgttaggagtatgcaagatcttctctaaatcagcagcataatgtgcctcattctgggttatgaatcagtagggcagctttaacaataccagcagctttttttccagttctgcaatggcactttgaaactatacaatctactttgttatttgtaacaaaataattcatatcggctaattctcttaggtcaagcctagaacggtacctcctacaatacaagcatttggctcccagagcaataaaagcacactatgttcttcacatacctatttaaagttcactcatcactgggatattcaatctaccattactttagcatacacaagtgtctattatagaactttacaataagtgtgaagggatgaccaaacaatagttttacaacattaacttgtagtttccttaatatcctcttatccaatactaattttagcaaaaattaatgatgcagcaccagacttgtttgttttagaaacaggttctgacacatatctgtgtgctgcttcatcatcttttaatgccctttcctcaatgagctcactttatcattatttaaattccacataaaagaacaatgcagttcattaaaggggaaaacaattttacattaaaattcaactataggcctcctgtatcttacttgtgactattgaacgttttttgcactttgacactggttctactctcagatgagatctttgattacctacaaagactttttatcacatgataggcatcatcacatctgcattaaatgaggaaacatctttaatgaatatacgaatacaatggaaaagagtaaaaaatgtacaagacaggcaaagcatatttaacaccttatgaaagccagacagaagggcaggaacctaagctccacacaagcaacagccacacattcagtgataattggtgcaaaattggctgtcatgatgatgaacaggtgaaagcactgtttcctattgaatgttgttcttcatcgaatgacattcctcttatctttaaagggaaattacacaaacaattttcatagttttaatgacagaaaacagtactaattaatgtctctccaaggtgagaaagcttcaaaacactacttgtcaacaggctctcttccatcgaaatatttggcccatgaaaaataatagcaacaactataatcttggaattcctgtgaaagaagaagagctaacaagcacactggatgacagaaataagggccatccagtcagtaagtagtactaattttgtggctacttcaaatggaaaatttcatgtcttgttagaaacactccatatctatcatttgaattaaggagttaaaataagctcctgtctagcctcttcccttcccccacctttctgcatctcctcctcccaatctgtctctgtgctagatggaattcagagccttaataggttaggctggtgcacttcctgctaagcaagagcttcagccaattggttttcatttcaatatgaaaatgagcataagaattacaaggatacatttatttggtgggttaaagagaataccatatgaacataaattaaaaatgctgtgcatagataacgtgtaattatccaaaggacaaggcatgagaatgtcatataatcttcattatactcagtcccacttacccaaacaacacccacaaatgagccagagatgctaacaaattccatcattaaaacaccatatcattagtcatatattatctccacaaatttcctaaagcattttactgggaacaataacttgagtgcaaaactgagaagagattcatcagaatttcaaagtaaaaaccctatgcatcacctaattctattgaaaacgatgctcatggcaaatttcacttatcacttgaaacatatttctgcccttggataccagaaccaaattaaaaaacatgctgttgctctgctctggcagagctgcaatgcattatgtttaaatagttcagcattcagatttagcttgcctaaagtacaatatagaatcaatataattacaaaattcaggagttgctactggaattagtatactaaaaagtatgaatgacattaccaaatgatgctggaatttacttttacagttaaggacattttcttcagtggataatgttttaaacagaaaatactttgtcctaaatgcatgtgtacaaatacagatatgtaatatattcatatacgtacatataaattttgtatgtatatatatgaatgcatgtatatacacacatgcacatagtgattttttgaaatctagacatataaagctcattacaagaatacaagagatatattttgtcatatcaataatatataatttcctacaaaaaatcaaatctgaaggttgcttttcaaagagctttagaagtgtaacaagaaaaaataaacaattctattaaaggagtaagtttttcttgttgacaataaattctttcaatgaaacaaacgtttaggttttgaaattcatacagatttgattaaagttcctggtgtttgctttcctttatattaaggtgagctttaccacacaggttatgaggcagcttacacagtttgcactcaaaacaacaaagcaaaatatgaaaaacattgtttaaaagtacatgcttcaatgtaaacttgattaaaggtggctgggctgtttgtgttttctccctcaaatctgaaaatttcatgtagcaatctgtttagtaggtagaataccagcaaaacactggaaatttttagtgactgcataaagcctctgccctcaaattcactgaattcaatcaagagacttccatactggtctcttgcttataatcatggatctctcatgtctaataaacagttcagtactgagatatatgtgcaaaatatgtaaaagtgtacacatgtcgtttccttaattggcaatatgaattcactgaggcaaaaatttaaagagttgaggtttgttaacctttaagcaaacagctaagctcattctgttggtgcctgggaattgtccctacttacagatttggcagtagcagaaatatactggacaaccatctcacgcttggtggtaaaatccttgtttcgtaaaggagccttcttttcttcattcaggttcatatcctcctattagaaagaacatctactgtgagaatggatggattgttgtgtaagcatcacaaaagtgattaatgcaattaatatttaacaacagacatattttgggttattatttactacttgagataccataatgttgtgtgtatttcacatgtattcatgatttatacttctccctagctgaactgtgagaagaagaaaactaaagaaaaattttaaactatgctatggaatactttggtggttcataacatagatgtacattatacagtcctagaaaaaccattcacttatctctacagcaaatacacacacacacacacacacacacacacacacacacacacacacacacacacacnnnnnnnnnnnnnnnnnnnnnnnnnnnnnnnnnnnnnnnnnnnnnnnnnnnngcgcacacacacacacacacacacacacacacacacacacacacacacacacactcgtgcactactctttggtccatgtttcccaaggaccactgttacccaagaaaacatatgtgatagacaaatttatcaggagatacatcgccaaagaaaaattctcagaaagttgttgtatatgaaacagaaaaaagaggaaatctctctctctctctctctctctctctctctctctctctctctctctctctctgtttctatgcattcatgtatgtatgtatgtatgtatgtatgtatgtatgtatgtatgagaaacaggaaaaactctgttttaaattatcaaccatatacatgcttcattatgaagcttcacacatgtatgaaacatactttgatcatgttactccccctctgccacttcttatctctacacctgttcctacaaaccatttactcttataaaatattcccctccttctattgtagctgtcagaaaactcactcataacttacccatttgtgtgcagtttaaggtttgctaatgttttccttatagaaatagatacaaaatacattcaggaaaattttaaaaactattaaagtcaaaagacattgactttttatgtcttcttttaaaattagaatcacttatttattcaacatatagtatacataaggaactgtgctagactgttaacactgaaaagttgagtaactttttatactcaaattaaatgctattatttgtgaagcaatggctggaccttagaaatgttatatatgttgttgactaaagaaacataactaattcatgatctaataggtacaaggaattataatggagacatgtatgagattccttgaaaatataagacagatggtaaataagttcagcaaagattttagcctagacttgagttatgaagaatgagaaaaatctgactaacagccaggagaccagttgaaagattccagtggtcatctgtcatttttggctacccaacacggtttagacatgccttctacgttttcatgcatcctcacattgtcaatttcagtttaaaaatgactccataaaaacggagtttgtctgctatccttatatgtaatttcaatatacacatgtggcttagtcttcaccaatgaaatgcatttataaactaggtgaagaaataggccaggaacaggccatccatcttgctggtgtgggtggcaacagagatgacgtagatagggagcggatggcagcagccacaaattttttacttagacagaccaattggttctggagtggcaacagctccttaatcagactatatttcactatgtggctctgcaagcaattcctataatgccatctggagtctattgttgcaacactcctgattgaagagcaagctaatatctcttaatacttagtctacttttgaacccaaagaagacagagtttatatttgtcccttgtttccttagcacagacgtgagaccaaaaggaaagaatgagagcctgtgttaacaattaatgcaggttcggatggtagcaggatttgaagggaattaatttaagaaccatgcaaatgtttttggacgtctgcattttctcgggctaaaatatacatataccagtttcaatttatgttcatgtgacatcacttagaatctatcgctaccactctcaaatattctgaggcttcttcttccccttgaaataatatacatctattcattcgaccttgaattttacagggttattggctaagcacatcattccatagcctcatattgctctggttttcatcaaaattcctatgttctctccacaagtgttggagtttttactgcctcaaacattctgatgacgtttctgtctgaaataaaagtagttacaacgaatctacatgtcccaagtacaatcaactgtgcaactgtcagaattttctggatgtgtaaacatccccacatatcctaaaagagtagtagtatcctctctccttccagtgatagctccacattggtacctccatttgatttttagtggcacgcactgcagtggtcaggccatcaaaaatggtgttgtcagaataacaggcaaggcagtaagaggaatgtaagattatatacctcagagaatgttgtcaaaattgagtatgatcatatatatcaagcctggtgtacattaaccagtgcccacagaatggtatctaccactacggctatcaattcctcaccgtcattttgggaacttcttctggcttaaccctctatgcttcaatacaaggtcggccgtgattgttccacatactatgctgactcaaacttcccactgttgttccctttgccacctctcacagtgtgagctgctgcctccagctaaatctacatctggccagttctttttttttccatttttttatttgaattagaaacaagattgttttacatgtcaatcccaggtccctctccctcccctcctcccctgcccccttcagtaacaccctacctatcccgtaccttttctgctccccagggagggtgaggtcttccatagagggtcttcagagtctgtcatatcctttgcaatagggcctacctccttgtgtcttgctggccagttattatactttaaactacactcatccgctaagctttccataagattttctggattgccccatttcaaaatggaaaccttcatcctgttcttccatactaattttatttataattaacaatttgtcagagaactatcaccataaaactctaaggtaactgaaggcaggaactttcttagctctgcaatcccaggtaagatcctggtccctggaatacagtaagcacttactaaaattttttgaggtggggtgatatttgggccttttctttaaatattgaaattgcctcagaattattagcatttttcacttatgaaatggctgcctacattggttaggaatgggtaacgttcatatgaacaaaagagtctataatgactcatttaattcttctagaaataaaaaatactactaattgtgcagctgatacttccaaatcattaactctagctttaaaatataataataaaactaaatagagcaatgcttgtaactcaatattaactctagacaacataattgaatacgaaactacttgtgaacacagttcttttgatagtcaaaagagaaagcaagttttaagcatattacatgtctgtttaatgtatcaacaatatatgaggaatgtagtgctacaaatgatgttgacatttaaatacctgaccacatagaatagttttcagcaaagccatatttgtaaattgcaacacaaataataaaaacctagagacaaatattgggattcaagctgaagattagagaagcaaagcaaccaagccacagcatctctttcctgtctctctctagacacattcctttactacctcaaatattgtttgttcttgttgttttgcttttatttcatttatttattttggtgctgggacttgaactcagaacctcatacatatacagcaatgctatattactgacctacatatataaccccaaacactgaacgactacagagatacagaaggaactatataaaaatagagtaagatgaggttaaaagttgtaccagctaaatattacttcatttaatctttctttctttctcatccctctctggttttctcttttctctgcctccaaatcttaggctagagagatatagacctttatggaaaattaattaatgtcactctagtacctaaaatatgcaagtgtcaataataaatttaattatttttgatgttttgcatttcaaaattagtggaattttataatgttatttaaacaaatgattttcctggttgtgtgggtggtaggtaagtttaagtttggttgtcttctgttttattgacacagggttttgttgtgtagctcaggctagcctagaactcataatccttcaacctctcaagtatacatccctatacccaaaactttattttctattccataattctagcttttctgaacaaaacaagaacaaatatttacttcttaaattaaaatgaaaatcagattttttttatgtcatttaattagtggccagttgacctggcagttatcaactgcctcaagttttcaaaagatttgggtaactctattaaactatatagactatagccacataacatataagagctctggtagcaaaacaaagtcaagtggacacagtgaaaagatagtacttctgaatatagaatgaggctaaacacaaaggcatacataatattaagtgaatattactaagtttcatgcacaacttcctgtctatttcttttttcaaggtcctgtcagaggcctccacccaaaatcatgtattttaatataagaaaacataactagagttttcactgtctaataattgctaattgtgagtacaatcatcaaccattatttctagagtagacagattacataaaggacccatgagggttgaaaaatggcagtcattcaaaagattaaagaaaataagatttactaatacctaacagagaatatacactagattcttctttggacccataggttgaatggtaccctaagtagtttaaatgagcagtgaaatattcacaatgcagatttatttgcagtcagtgtactacaacacactacagttaatgttaggtatatttactgattattttgtctccttttaaccaaataagccctcagaaaatagaaaatcaactctaagtgattcctataaagacaacagattgaagataataggataataccaataatgcgagcgcaagggaacaagaaaatgggagactgttagatgtcttctttgtaattcttcatcttttatccattaccacatagtaaaaataacaaaaatctaactaataaactgtctcctcaagacataaatgattaaagtaatgatttgaaatacagttacctatcaatcatgatgatgactctcactttaagtgcatattatactttaaagtcttaggcaatggtagttaaattccacctcaaattaacaaaccatttaaatcttagcagccagagcatgaagacagcgtcttcaattttctcagcaataattagaatcacatgatctcaatcctgtaccttagtgatagtgtataaacttaatggcacatgtttatgtgcctcttttgaattttcttaatagcaagaaacaaaaggccccacagaagcttgaaaacacttggtaaaagcagctgaaataataaatgcaaaacaaaaactcaaatgccttccttgtcatcaaatactgtcacaagacacacagaaatcattgcaaaagcaaaaaaaaaaagtgctaaagcaggtattaggaaagtgactcaagtgtgggtggttcactataaagctggatgaatacagatattttgtaaaatagctcatactaaaatagtttatagttgtttcaatacacacacacatcatttttcttggagtcactaacagaacaatttaacatgaaaaatatattgacaaaataaaagctgtagttaagaagatgctttcaggaacaaacaacacacacacacacacacacacacacagagagagagagagagagagagagagagagggagggggcgaggattcctgaacacacttacatgtggaaaattcaaacagtattttattttattttatttttggttttttgagacagagtttctctgtgtagttttggagcctatcctggcactcgctctggagaccaggctggcctcgaactcacagagatccgcctgcctctgcctccccagtgctgggattaaaggcgtgtgccaccaacgaccagcaactcaaacagtattttaaaccaaagtgtacagactgctatacaaataaataagtcagcttttatttacagaaaaagacaaaatttaaaaaaaaaaatcaagccagcaagggtaatatctcacacctataaatcatgcactcaaggagctacaaggaggaccacaagttcaaggccagcttcgggtacatgatgagttccaactagttttgtgtgtgtgtgtgtgtgtgtgtgtgtgtgtgttgaaacaactataaactattttagatagagtgaaacaaatacagtaaaatatttacataattatgaaaatatttctccccaatcatagtaaataatgtaagctaatgtcagaatgaccaacatatgtttcccctcacttgtggttctgaaagtttatataaatgtgtaaaatcctatatgtgcatgacatgaaaatagacttgaaactgtcatggggaacaaaaggactagtataagctgggagtgttgataaaagagaaggtatgggggctggagagatagctcagaggttaggagcactgactgctcttccagaggacctgagttcaattcccagcaaccacatggtggctcacaaccatccgttatgagatctggtgccctcttctaccggaagcagaatgttgtgtacataataaataaataaaatctttaaaaaaattgaaaaaaagggaaggtatgaaagtagggagggtaaatgctaaacatacaatctgtacttgcatgaatacttcaaaatacattttaaaaagaaagaatatattttctccctacaaacacatctctggttattgcaccattattttaaaccatgatttaggcatttctcttttaatttaacaaaatagtgcccagttagaaagtaacttcttttcaaagaacttcatgttgattgacacatattggctgacccaacttccatatcagtcttctgctggaatcactgttaattctttcttctcagggctagatactgtctggaggagacactcatgaggataaggatctatatatgaatgacacggaagtgaaaatggaaagagtctattctctaatagcattaattaaagactctctcactaaagaacatttgaacccattaatgtagaaactttaatatataacatgccatactcattgcacaactggttgtcaccaaaggggaagggaatttacttgtcctggtgaagcttgattaatggaatggattggtaagtcaatgttctgatttagtttttgctaactatctacttgatgcatttggaccagcattttgttttatgtatttttaaatgtgttttgatgcatgtatgtctgtgtaccatgtgtgtgtgcctggtgccttcaaatatcagaagcagatgttagatcccttgagacaggagtcacaaatggttggaaaccatcaagtatgtgctaggaattgaaaccaagtcctcgggaaaagcacactgtgccatctattcagccctgaacttgggcttctttgtcagcttttggctttgagtgccaaatatcaaaataaagatgtctaattgctgcctattttaaaacaagacataaaaaacatgggctcactgtcagcacacaataaaaaccatcatgaaagtgaagacttttgtctgaaaaaatatattcattggacaatctcattccttcaaggttttcacaatcttgaatatgccttcaccttataaggtacataacattagcatatgcatatattcatagttgaaaatgagacagtttgaggttacatgcagaaaaatgtatacatatatacaaatgaattcatacacatacatttatttatatatatactattcccaaatggggaagaaaaatcaaaaagcataaagaccaccgaatcattcctgaggttacaatgcttttctgtagtatgtcagtgcagggtaataagtgttttagactttcctcattaatagtctctgctttctttttattcttttctgggcatggttttatttttttattttgtttcagtttgctctggtttggtttaagtttttgaggcagggcctacgtatcccagattagccttgaattctctatataggccaggaaagcctaaaccagaattaatttttgctacagtacaaagacacaaaataggaatttaaaaatagacatagctgcattccacaaaaaaaatctcctctgtagacaatgaaattcatgtaatttccatgcaccttcaaacactcttctccttaaccatttaaaacataaagcatggagccagtgaagtggctttgcagggaaaggcactggccttacaagtctggtgacctgagttgggccctggagaacctatagtaggtggaagaagaaaatcaaatcttacaagttgtcatctaacctcctcctcatacacactgcagaatgtgtgcattcctacctgcactcacacaacacacacacacacacacacacacacacacacacacacacacacacacacactagtgtcaagtgaactcttgaactttgatgaattcctcaaacaatgagaaggcactgatgccagaaaaacaaagactgaaaattcagaatttgacactggcttttcacactttccttacctctacatctgcttctttcctgagcccccatgagaggctgaaaggactatattatatctcccactaaagcagctgatccacagctagcctcaattttagggacgccatagctacctgtctatgtgactgaactccgctctctgtggataaaagtaggtgctacatttatttctaaacctgcagcccatagcataccatctatatcataacacagatcaactcataattgctaaaatgtattcataaagaatacacaaaaaaatcccttttttataaaggtacttattttcaaggcatttccaaatgcaggccaagaaaaaaaaaaaaaagcagtggttcctgaatttgtcccactacaacatgaatttgcaaacctagnnnnnnnnnnnnnnnnnnnnnnnnnnnnnnnnnnnnntttctccttcaatacctgtcttccttctctttcgctcaggaaccttttgtgataataataatggcaaaaattaaactgatccagatccagattagttttgacatctgttttctgagtacatgccactactcctttacatgttttccacacaattcttcacaggaaaataaaatgtggagcacggtctaaaatatgggggaaagaatgtaggaaatttaaatgtaactggtggcaattgggctgtctgaacaatttcttagaatctaatcatttccgacactattccatggctttttgtagatgtgaaggcctagtttaccaataatgtattttatggaaacttaactgttattaaaattacttacgctgagcgcaatcaaaggttctcagccaagctaaccaacttctaaaaccctggtgctgagtgagaaaaaaatatcctttaacagcaatcaagggaatgcaatacgcttgggttaaagtagagcacctggtgtccagaggcaactcttcggtgtaaattaatgaaggagaaaaggaaaagaacaagattaaaagatttagatttacctgtgagaattctaacaggtgaaataaaaacaccaataattaagcacttattacatgtaactatgtcatcattaaattatgccaaagatgcaaagtacatcgatataatacaaaaaatactgtttgtaaagagcgtttgctttatgaaagaattaccgaaaagtataacatgtgagatctttaaatctgtcagcaacagacagtggtattattattaagatggtcttatgtttgctacatcaaatatgcaaatatctataatatgaaaagggatttatggatgcacagagtaaatgtgagagtcaagaaaacattcaaagtaaaagtgagtcacttaccctgttttgagacaaggaagaatcttagtatgtaccctgttggctgacatataatttcctatatatcccgagatctacctaccttggactcctgaatgctacaattacagtcatgtattgccataccagatagccctctcatttaagaattttcattaacttcaaaataaatcaaggtggttttagggggagtattagggaatgattaataataaaatagctaatacctattttgaaagttctattctgctgtaattttaaacttagtcttctaataactgctacaatgagaaatgctattggtacttttgatactcaagcactaaaactatcaattatcagaatgaggtagaataaatttgaatattgctttttattgttttccccataaattttatgaaaacattctatttctttaaaaaaaagttaaataatccattgcattagaaattgtaaactaaaccaggcattggtggtacacgactttaatcccagcactctggaggcagaggcaggaaaagccagccgggtctacagagcatgatccaggacaggctccaaagcaatacagagaaagcctgcctcgaaaaaccaaaaaaaaaaaaaaaaaaaaaaaaaaaaaaaaaaaaaaaaaaaaattttcacaggtgtgcannnnnnnnnntaaaaaaaaaaaaaaaaaaaaaaaaaaaaaaaaaaaaaagtgtgtgaaaggtgctatttgatgccgtttcagtatgtcatcaaaaatatccaaacacatcttttatactatggtgacacagttccatggtagttctggaaactgcaaacattcactaagagaaacaatagaataaagggaacatcaagagacactaaccagatcattttagtaatcatcaaataagacaagaacatttttgtttacattatttgtaaggaggccacccacaggtagtgaagaaatcacagaaatttcatatctcaaagcctacttctgtgtttcagaaatagtaacttcagtgccttctctttatcaactatgatgaagatacttcaacagctttctattataaggctgttggcctttggtgaggttctataaagggcaactgcaaataaggatctgtcatctgcagaaaatgctacatctcagaccctttctctcgtaccttatgcatctcctcaatatttatacaccaaaacgtactgatttgatatatagctttaatgaaatggtaaatatagatgtcaccaaaattccaatgttttagatttattgtgtacctaagtgtgtgtatcagtatgcccacttaatagctttagcaagttactgaaccaactttcttagtctctctctctctctctctctctctctctctctctctctctctctctctgaagctcaatctccttatttggaaatgagatcaaacaattagtacacacttagaagaacagtcataagaataaaatggcataatacatgtaaaatagtttcatgattgggcaatgaacttatagtaaacataaacaacgccgattctgaaaagaacatgttcattggaaggcaatattggtaaattaaacatagaatacaaacaaggggtaagaaaacttttctcaaagaatagatataatcctttcaaagtttcccatttatcttggttgttaactttcaatcaaacgatgtttctcacaaaagctattcctgatgcatttatactattattttaaagtagtgtgtttatttataaatgatattcacacatatatcagtgtttctgttttgctgttatcagtgatcaagacagtgtgacaaagtagtaaaatgttaagaaatgttggcaactgaacaatgatcagagtttatcagataaaggaaaaaatgctacaaatgtttataacatattcactataaatatatgtactctctgaatagatttacttacatttactgactgtaagtttttcaaacgttataaaactaccatgtacaacacacattgttcaatgattaagtcttgtgttcttaattatagtcatattttatacaatagatctctataacttatcccccatacctaaccaaaatcctattataatcctttggcaatcacctcacttttcttcctccaactatatcagcctgatggtaagctaaattatcattgtcatagaaaataatatcgtcatcatcaaactagtaaatcgaataaccaagtaatcacaccattggatataaaaacagtattgtcgatatacaagtatataatacttttatgtaggtgaaaatgatatatatgatatacaacaaattaaataataacacaatattatatttcctatgaaatatatttttgtttaatatcttcctccaaagctctatggaatgaaacaattccactagggaaaatgtagtactaacttatacatttgcttaaataaaattaatgaatccaacaagcaaattgttctacaaaaggtcacacatttaaattttttaaaaatatataatattgtagtaaatattagaattaacattaaatgataaaacatgattatgaaaggttataaaatagttcatatagtgctcacaagttacaaattattaagaatcactattgtatagtgtttcaagcccataaaaggcatgtgtgcaacttggaggaaagtagtaggaatagaactattttttaaaacggattgagatacaatatctctatgaattgcatgctagttttttaaccatgatcctcctccctcagcctccagagcattgaaattacaggcatacacaatgactccaggcaaaacagtagctatacaccgaataaaatggaaggggggaaagatctaagtaggtaaaaaaagaatggcaactccatgtatacacacatataagaatcggacatgaaaggagccaagacgttgctgcagaaactcgcagaaacagttgacctgacctagtgaaagcatggagaccctagtcataaaggtggggagacagcactggaccaagccaaaccctctgaatgtgggtgccagctaggaggccaagacagtctatgggacctctaacactggagctagtctttaaccctagagcacaaatggtctttgggagcccattccctatggaggaattctattgcaacccagatacagcaaggagggtcgagaccctcccccaaacaatatgacagactttgaaggtccctggtggagggcctcactatcactgggaaggagttgggggatgggttgggggggttgtggggaacttgggaggatgggagggatggatatgtaaatatgagtagtaattaaagaatttaaatataatataataataataataataataataataataataataataataaagaattggacatgaaaatttcatccatggtaacaagaagcaaagcaattagtccagagtctaaaagcaaggtacatgtggtagtagaggcccaagaaaattcccttctcatccttctattttatttcatcaattaagcagagaattaccagaagggttctaacatttctggtaattaagacgggacactggaatcggaaacaggaacaattgagtgactgagaaatattaataatacaagatagactagggtttgtttgacaaaggaagggatgctacaaatgttattgtagtctttatataaaatgtatgttgatgtgggagatgagaatgtttggtatctctaaaagagatctggtcaagctaaccaatgtgagatagcccaatacttcatttatccctgctccagacataaagtattgaataatccaagtattacatttattattttagaaataatagaggacacacacacaaagaaaaaattaagaaacaccctacaaactgtaagttgtatgactcttgctgatatgagaaaatagaatgaattaattccttggctccaattaccattttgttgtttattttacactctgccttcccaactatatttcatctactcaacagatcatgtagacttggacacatgttgctttggaccagcaaacacacagattatttaattgaaaaattgatttggtgtgccacaaaccacaaaatactacaagacaaagaggaataaacccgtgtctgattttaggcactctgactagaacagataggcattctagcaaataaataaacaaacaaatccaggtactcttggaaatacttttgtttttttaacaagagttggatctgtcttttatatgacataaacagtcaactacaaacatccctatttaaaatctattctagacatacacagtttaaaatgacaatgaaattagaggtcgaactcaccatcattttctcaaaaaggtccagaacttccttttcagacaaattcagagatcgttcatcatataatggctgagccactggaaactcactcatcgagacttgagaatcaataggatgttgaataaaaggtttttcttttttgacagtagattttctgaaacttgtaattcgatcacgctacaaacagaaaaataaaaagccctcagaaaaagatcaggagccaggcacattaagaatggaagcatcaaaatggcacttagtatgttatctattgttattctcttttgacaaaacattattgtaagcagcaagctccagttagagattggactgtttttgcaaccctgaagtcattcctaagcttcagaaagctgggggagaaaaaacatgcctcaaaagtaaaatttagtcacttgtcatttctgttttacaaggaaggaagtgaagagacactttggatcaaaattttgtggtggctgtttctgcatttgttggaaacgaaaacagaaataccttcctcctccaaatactattctgatgtgtgggtatttcctttaaaccactgataccatgtacaatctctaacaattagcttgctctttcgtatcaagtaagtcaaggactttgcttgcaagtcaagaggatatttggtttaaaagccatcaaatatctgacatcaaacattagtaatattcataaaactgaaggcaactcagttttattctggtgtctgttaggaagcacatgcaatatcaagtcacattaagcaagcagacatgttagctatgaggacagtggaggaacactgccacatgaccacacttcatttaagtaacctttaagaatacaaaaacattacagacatcactacagtttatggaaaattttgttgaccccccctaagagtacatattcttcattttattgatagatacaatgttttttgtaaaaccataacgtgtactttgaaaaacagcagttttaagcagcttagttaggattacaaaaattatttgagtatgtggttgcttacagagagattatagaaaccacaatagtttggaggtgggaagaaaaatgaaatagcatctaaacctacttcctcaattcacagaacaggtgactcaaacacaagagaccatggttctgatctcagctttcacattacaattctttctttaaaattatttgaactgtattattgggttttactgtatgtctttgagggcagttaagttggtttacataggtagtgtcttccttcccacaactcaagaaaaacaattttagtaatcccaaataaactgagtcaaattttacggaaagagatggtggacatgaaagcatttaaatatgcagttagccactcacttcatatcactgaagaatacttatacagtctaagcttctgtactgaatatcagcattactaacatatagatttgctatttctgtgcccttcactttaatgcaaaaactgcctttgtctttcagctgtatttgggtaagaagatgaagtcaagttgtatactttcatctccttagagcagtaacattattttacatcttttgttgataggtaacttcaaacagacaaaaaaatgaaactgtttaaaatattattcaagaaagtttaagtaaaaagagtacatttaaatatttgcttacaacttttagtaagaattactattgtagtctgagcttgaaaatatatataagcttttaaaattcaataagcacatatctaagataataaacttaatttatttttgaattgtaaacaatttcctccaatattggtatttaatatatccacaatttatttggctatcaaaagagaaaatgtccaggttttccagcgtccacctttatgcacaaaactttaaaatattgctttggtatatgttacaaagataaagaaataattgatctgggatatgacccagctgtttatgtaagtttagggcagttgtttcattttattgaggaatggtgagacactacttagccctagctgacctagaactccttatggacaccaggctgacctccaacttgcaataatcctccttcagcctttggagtgctagaattacaggtatgcaccactgtgcctgacaacaactgtttatgttaatgtgtgaaaagggagaaattgctctattggcaattatcctattctgttctattttctaaacatccagtcactttatatgctgcatatatcaatgctttaatgtccatttttaagtgaaaatgtaacgtgcataagcaatacaataacatgctgctcactccaccttaccacatcatctgccaaagtttttatttgaatgttctattaaaaccaaaaggaaacaaacaaaagaaataacagtcagataaatgaaattcatagatcaaacaaaacaacaatgactgaagaaattaaatgcttctcatcttttacaaaatgtacattgcccaaaaagttacaaaattcaacattcaaataatacaaccattacaaattttttttaaaatgtaggaattacaaatgaagtttggattgggggaaagtaatctatttgtttttaaatatgaatgttaagattcaccctttcacgtctggctcagagaaaactacaaccatgctcaagatgacagatgactcagtgaaattatgtttcttgacagtctttgaacaggtttggcagtgaatattttcttataggtgattaaatgaagacaaaaaaacagtaacaatgtcacatatagccaccattagagtaaaatattaaaatataacaaagactaacagttcaataaaattcagcattcaaaaggtttttcaaaatcttacaatggcatacagtcagtatgaattttagatctcactacataagtacagccacatatcacttcatgatgatgacatgtttctagaaatgcacagtaagtgacttcatcgttaagtaaacatcaaagagcaaacttaagcaaacaagaatgtcattagatgatatactattacaggatcaccatcatatgtacagtcccatctctggctcagactcctcatatagcacatgacagtacattgaaatgtcctttaattaatatatgtatattaattaatatataaaataattaatatatatatacatacatatatatatatatagagagagagagagtgagagagagaggaaagaaccattccacaatggttagaaattgaatttagtccttctgacttgtttcataatcttgtttcttacagaagaagctgaataaagtatattttacatggtcatggatgttggcatgtatttttactaagtaaaatacagtgctttcactgcagagaatttcattgtgagttttcaataagtcaaaactgcttggtctcaaaaatctcaggaaattgcctacaattactattatcctctctgtgctattaaagataacctttccccagaacagctgtggcaaatgtactagtgcatgcgtagaattttttttttgtatgttgaattctttgattctgtcaggagtttaaacttctaatccctgtactaaatcatcataaaccacaaccagtctttattgccttgaaaaaagaaaagagggggttggaagatagcttagtatgccaagcgctcactaaacaaatgtgaaaacctaagtttgaaagccactttgcagtcctttgcatctattatcccagtactctaacgataaaatgacaggcagtgacaggagaacccgtgataactagtaggccaactaaccatgcagcaaacaagataaagaggtgtgggcccagaaatacccaaatatatgttctctgacctcccttcatccataacatgctctagaatgcatgtatacacacagatacacacacatagacacatgcatgtgtccacaaacatacacacatgtatgtgcccacacagacacaggcgcccacacgaatgcatcatccataagcacaaaagataaaaatggagattatatcaaaactaaatcaatctctaaaagattaattcaccttagaagtttatgcacaaaccatttcgttttgagtttttatggtgggttacagaaaaccttcatgcatggtgataaagttgattcctagtaaagcacaattacagacctgaagtgaccctgctaacatctgacatgagcctgtccatctgggtttctgagatagattacataactccttaaacaacttctgctttccttttcttccattccattggggttataaagttatgattggaaacttctatatctccaaaggaagaatataaattagaagaaaaatgatttgctttagtcaaattccctaagttaaggtacatatatgccagaaatgcttcagatctgtatctcaattgaacacatgttgacaatttaatcagtggagacaaacacaagaaaaattgaaatgctagctatcttttcacttggtttgacaggaagaatctggaatcttctcacaattctctgattttgagttgatattctttttgttcacaataaaccacatactatggacagttaaagttgggtggaatttaagataatccaagcaaaagaactaattttacaaataagagtgtaccatttgtgttaatggtaccactgtattccattggtctatgttaaagacttctacgtatcatcattcttcatttccaatgccctaaagactaactgttcagtaaacacacacacacacacacacacacacacacacacacacacacacacacacacacacactaaaagtctacttcaagccaccatcagttcttacccagatttccttagtaaccgcctatcttgtctcccttattctagctttgctctcttacagtgagttttgaaaagggcagacaacattatactgtgaaaaccaaagtcatgtcactcctaagttcaaacctgcaatgactctattttcctttccaatgcaattcagagtcattacgatgactacaagacccatgacctcatttcttactgcttccccttcattcaactagcttcattcacactaaccacctcactgctcccaagaaaagcaatcacccacaggaattcactcttccctctgcctgcaacattcatttctgttatctgtaaaacttgctccttaatcctcctagcaatgatttttttctcagtgaggcctactctggtaatactgttataggaataatatgggcctaatccccacattcccttgtgtttttttttcattcttcaaataaaatctaatataccaatctacaatatattgttattcattttctgttggcttttgctttgttttctctagtgctggggatgtaacccatggctttgtacatgctaagcaatcgtttttccactgagcttacagccccaaccatttagtatctcttctgctcactataatatgagctgtataaggacatgatttcttctctgtctagtttggggctctgtttctgatgcctaaaacaatacttggtacactaaggctcaatatgattatgaatgactctcatattccattttataaatatttaatgcctcatgctactgtaaggactaataacccaaaggcattcaagctctgaatgacttggccccaggccaccttctacttcttcccttctgacccctgtactacataatacaaaaactgaaatcttttgtgtagtgcattcctatgatgtcctgtttgtacttttgcacatccattgacctggaatattcattttagaaggacatttctaaatttctatttctatttctaggtgcctcttaaatttaaattttgactactggcaaaccaaatgtggaaccctggtaaaataaaactggataacgactctgctctattttattcttgaagaatttctccctaatacgtattttcaagaatgatagagcaccccaagggagaaagcaaattagatacacttaaaaaattatctcaattacttatgatagagagccataaagaaaaaacactctgctcttgatttcttgatttataaattttattccactacacaaatacattctatataaatgggcgcatttactgtaacatggttattttctaaaatatttgctttcaagagctagaaaaaaggctcagcagttaataacacatactactcttgtagaagatccaagtttggtacccagcacccacatcaggaggttctcctataactccagctacagaagagccaacaccttttctgatcctgcagacacctgcacacacacatcagacaatcacacaaacatatacatgcatatgcacataaaaaaaataaaaagtagttataattttgacttgacaagtggcatatttcctaaatataataatatttaaaactttccgttaaattgtgtgagggaaataaccatggtatgctaaagaggaaaatgtttagcagacacaaagtacctgagtttcagaaattgtgatttttcatcactgtatacgaaaatgtgctgaaatcatagtataagtcacaaatggtcatcaatagaaaataaatgatttctgccacatgactgaacatcagtcaaaaaacgacaccaaacaggaagttcaaagaactgtaaagagctgttttggggcaagtttaaagcaatcatgttcatatgaactgatctttctcttttttgtaagaatattatataatcagtgaaggtagggtattaatgagttcactagacccaagataaacgataaatagctgttttattttggaacaaattacacagataatagtcaagaaccaccgtggcatccctctccagaaaagatgtgagagcgagcctaccctgtgctctctaccttctggtccacatattaactgatattaaaaacacattttaaaattattgtattaaagtacaccttcatacaaccaaccatggtggtgcacacctctaatcccagcattctggaggcagaagcaggtgaatctcttgaggttgagtccagccggatgtgcatagcaagagttctaggacagcaagggatacacaaagaaagcctgtctgcagtataatacagtggttgagcattcaccgaatatgtatgagagactatgagttaggccctcagcacagaaaaacattattttaaaataaatagacaaacacttcatttctaagtggtttttaagaaaaagttctcaaatcatttctgaatttactttatatagactgaaatatctttcccacaggccatggaggtaaagatgtatcttacttctttgtacaaagtatagatctatacatatacatagaattaaaaaattaaaaaaaacgaaagaaaaaagtgaccccccaaaaatggaatcacagtcttgaattaaaagcactgattaaagtcattttggtaaggttttattatgcaaatctaatgataatggtcattacagtacatattacatcaataagtatagtgaccatatattttcattaaattcaactctgaagaagcaatcaaagtacgcattagtcaagcaatcagagtttattaaacttcatttatgatgagctatattaaatataacagtgcagtattttatagtattatctaattataaaagtattgctctagagtctcaaccctttaagaatacaagaaatggtgaacttacttataaactctaatgttgaagttctgattgccatacaaaagatcattattgcaagaaaattaagttttaattttctcaatcaggcagaaattaacaaaagcagcaaaatgtaaagagtcaactctctcatggataatgttacatggaaatacaatgctttataaacattgtgcaattagtctagcaccacagaaattggacaactaaattggatgcaattcaaaagtctcatcgtcaactcaaaaactcaatcactgtatttgacaacttttttctcttttaaagaaaatcaataagctggccattacaacaaagatgaatggtcaattattcacccagctttaagtatcttgctctccaaaagggccagggcaatggaacacagaaagacacattcaaatcaatataacaaatatttgaacatctactatataggttctagttagttagtgatcagaggattgaaagaacaatcacaaaaaaaaaatgggaaaggggaaatgccgtgggagttcagataaaggagtaccttggtacagactgaacataattccaagttagagagaccttgaggaaggggagcaagagagccaaaatccacccggcagggttggattcctctacaaggcgtgtctgcctaattcctatctatccaaattggtagccgtcatagaaggaagtagttctgccttccaacttttaagattctatactctgaactttcaaagctagcaaaaccaatcaaaataattccaggtcatttgaatacctagtaatcaaaatcaaccttctgagcaatcactgaaatccttcatggagattgtgttagtttagtatctctctgatctatttatttcacggagaaaattatctataatctgatttttagaagcaaactcaacgtagatgtttgcttctaggatgacaggagaataaattttagctttcaacatcatggaaatatttactgcctgtatttaaaattaccctcaattattctttcttctacattctaacataagggtcattttccaacagaacacatcatgtttggcaatattgtcctccatcacaattagcatttatgaatagatgctaggcgaactggcagcatgctaagcactgaaaatttaaagaggcatggccctgctttcaaaggtcaaaaccctaacagaagagaagatgaacttattgacattaagctccaaatatcttccctactttggtggctaatgtctataaccatccatttcttcatttaagtagaaaatatgtttctatatttgttacagtaagcatgccatctcagaaatattgtcaagttgaagattcaaactttaagctgccagaatttttactactacaaataaaaattctttctgtcattgttctgacaaaaaaaaatccttctgggatctgctcctcaagctgttctttcgttgtagaagaataaaatatttatatataggagatcaaatataacatcaaagtccagagcttcagttttcttcatgaagcaaaatactggtactgtattaaattagtattgttcgtctgtcctaacaagatatgagctcaatgtgaaatgaaatgtaccaaacttgaccattaaggcaataactatagtatgggaatccaacagtctcttccattgaataagcacctcaggaaatgtatgctggtcacttaggtgttcaacaaaagctcctaataatgaattagtgaaagccacttaatgtctaaattaagcaaaaacaattgcaggaataatcaagctttttataggaagagctgcttctgcaagcacagaaattacatttgtttgctatgtactaaatctgagataggaggaagaattcaacctgaagggttttccttcatgaactatgaatttaacaaaaaacaagactagaaaaatctagccttacataaatacagatattccaatctttcaaagcagtaattagtacattagattacacttggatcgatgtgttggccaaatggggagcaatgtttaataaataaaattttacctgctctgttaaccaatggatgaatgaattgagcaaacattaagcagttacccattattaaacaaccagtattgtacggtatatagaagtataagacatgactcctcccttaagacatgtgcagtctaaccagaagttagataactaaccacataaaaacaagacaataacgaaatactatgctctaaggtatgcagcttttccttccctaccacattgtcctctaaaatcaagacagcattgtgtgctatctgtaagaacttgctcacaatttacatgttgcattctacttactagcaaacaatttccctcccagcagagattttgagagtctgcttagctttctaatcattaacactttgaacaaccattggcacctaatacctattcaaatatttggtggataaattcttttaaggacaaaaagaatttaagtataagaggaagaaatggtttaaccatttctgaagtgggtgagaaactctgctaagactcacacactaatccctgggtaggaatagtcatgaaaggggggaaagggaaggaagtcagacacaagagggagcactctgtgcttcaggggacttgggaggagtggccttaggaaacaaaaggttcaagaggaagggcattacattttcaagatgtgactctggtcagattagagttactcttgaaaaccacaagcggtaatctacaaaacatttagcaaccctgaggggtcctaaggacttcctgattcacagaaggatattggagaggtgatgattttaaaaaagctaaatttgcatggcgtggatccagtcttctttggaattttggaaccaggtctgttttggaattccaaataattcaagttttgagaaacatggttccatgtacaacaaataacaaaatatacccagaaagacccacagtagcatactgaattgcattcaagttcagcaataaaacaaggatgttctaccaaacaggaaaaataccatctacatgcagatttaagtaggccaagttttacagccaaattataaaaggccattttcagagtttacaggttttagcaattcagatgatattctatgatattcagaactgactgaggaaagactcaaagacacaataattagcaagcttggtcttttctatgtatgtaacagcaaccctctactgagtgtttattcaatctaggtataatggtaagagccttatatatgttgcttcatttaaacccccacaataatgatatggagaattatttttctattttgcattagcatttttaattagcatttaagccatatgattaagattccatactctgaaacctcgatctcattttgaagactttagtaaaccgtatggattagtataacactcctggttaaatcttgagcttgtttgtcagccttggcctttccctggcctctttgctagacttaataggccttattctacatcactgctctttcatctttagttggccatctcccattcatcctttctgctcttagctaaggttattgttctcttatagtaagtgacgcatggttgctgacctctcccttttgtaattatcagattacaattattccttattgccttccttgctatactggaaactcaatgtgctcaggactaaaagtctgtcttccacctctctgcctatagataaatctctacccatatctctctctggttctttttgtggtttttactgctgtcatttttttcagtcttcctgtgcagctcaagcttgtctcaaacacacaatccaatacccgtgcctcactctccccaattctggatttgcaagcacacacaagcccacccaaactcacgactagctctcatccttctttgttcccaccttatcctcggggattttacacagtagctagaattgagtgaacattcagatttgtaatgactgatggaaatgggcctgggaaaaggagcagtgatggaaagaaaacgagatccaattgttatgataagagctcagattaggtggtagcaaacggaacagagaaagctgttagtatatgtaattttgtttaaaattacccttgttgttgaagcaatgtacccagacatatgattgttgtttgtattaaatagagtaatttaaatatatgctgttgtgattactatctttacaacacacaaataacctctaaatggctgtgattactactactagatacttcaccttacaacgacttgccatgcatctccttcaagaagcttttataaataaccacatcatttagttttccgatatagctgaaaaattaatctgacaaaacaaaatgatttactccttcaaagcttcaagagtataaattgcctaaaactgaaaattatacctgaattttgaatatgttattattaaacctaattttatagggagaatgcataaaattcaaccaacaatttaagttaatgtcattactagtacttttaggtgatatttctgaatttcctaacaatccacaattcaggaatgagtcaagtctaaaagtctgtttgttcagttcaggtttttagcccttgggaaacacaaattcaaaggtgcaactcaaagccatgttttccatctaaaagcagacctcttcagtacccagaaagccaggcagccttttcagactcacacaagaatttaaaaagagaatcttagaaaaccaacctcagaacaatacattgccaaatattttaaaactaagaagcttgaggaaaatatgatgatatgatagccaaaagtaattcaattttcagaaggctaaaaaaagttttgcaagaattcagtattttaaaaatgtatacaaatatttatccttgatttttctcatgacaggctacagattcttaactcaatagtggtagctctgttaaacacatttgtctaacactgagtcttacttctgaatttattttcaatttttaactcagttttaatttgcttaaggcattcacttctgagctaccaagagaaactgtcaaaataataaacagcatataccaaaaatgtcacttaaactactatgatttacaaattccatcatagagaattaccagatagttttcattttggacatgttattatattaggcaaacaacaattgaattagtgtttactcatacaggtcacaaatttcttctaaacttgtgcttgtcaaaatgaactcttcacaaatttggatgtttgcatatagaaagataataacagctaataaaacagcaactatacctgaatttcaaggcatcatatgtagtctagtcattgtataaaataaaaagcaatgacctgcacatccctttgtctgtaaaacttcagaaccaaagtgataacacttacacatttatggaacaaatcaaatgacttcagtatttttaatactgtgaaacacttaaatgctttagtggaaagatattcaggctgaaaactcaccactcttcttccttgccccctagactttagaacagtggggttgtttatcaatatattgaacacagtttagataaagccagaaaatatgaagagtccattaaccccttccataattcttgaacattaccgatgccaacaaaggatttcaaccagaaaagcaagctttaacagggatgtgtatcatatatttgcacctagcacttaatccacattaaacttgctaatagtactctctctctctctctctctctctctctctctctctctctctctctctctctgtgtgtgtgtgtgtgnnnnnnnnnnnnnnnnnnnnnnnnnnngagagagagcttttaatgcaagagaaagtctaacttctccaggataaatttgaaaagttctaatcttattttaatagcttctgtagactttcttattttcttcaatgccaaataatttggactgataacagtttggccaattaggaactagaaggttgaacttaaatgtcatacaactgatagaataattaacagtcagtgtactgaaatgaaaatataaatgtgcttcaacatttacagaatttctcttgctgtgttatcttgagttttggccccaaattaatatgccagaaagacagggatagccaagaattttacaaaatacctaaattgacttctcaccattataattctagtttctaatatggaatacttactctatataaaatgactaatttaatagccataatcaataaatactacagaaatcctccacatacataagctgtttatagccatgagatttgcagtagttctatcgctgtattttcctacagaaccaagctcccaaatgatggttaaattcacaggtcaacttcatattcttgcacacacacacacacacacacacacacacacacacacacacatgcacacacacgcactcgcacacacacacccctataatacacctgcagattaatgaccgaaggagatccaactatgatgtcctttggaacattatctatgaaaaacgatgaattagaatcaggttataaaaatgcttttcttcattacaggcaaggttgggtgcactaacaatggtccacaaggagacagaagaaaaacaactggccacttatttcaagtcaaagtattcagaaagcgaatagaagaagacacactccaaatctaggaccttgagtagctgaaatgagaaacggggcaatgcaccccttctattaaaggaaatatcctgggatctaaatgcctttataaaaactgcctcaagagtacttagagtgaactctttcaagagcttaagtataaatttgatccaccaagttaaaaggctgctgtattttcagatatccattgaccttgtaagatctaaaatttcataaactatatacaagcccactgctacttaaaatggtgagcatttatcttaggaaaatactaaaatgtgctcttccctttttaatacagtaattgaacatactaaattaagcactttttcacatgaaatacagaaacaagactacatgtagacccaaagctacagacaatacccacctggaatgtgtaacttagactttgaagaagtagcagtttcttaaaactttaagaaatgtggcgtcaatcatcagtagctgacaaggaccagtgctttggcgaaggcattaaagagggcataaaataccacaaaacaaccttttattaaccccaacaccctggttcacattttactacaatatttattagagtatataacttccaactttaaagtagggatttcaagttagaactgagtcttatactttggaatatgctccataaatgggttaaagatggccctccatattgatcaataatgacacatcacctccacagtacataaccgcatacctaaggttctttttcaattgttctaaatgtctcacccacaaaacaatattcagcaatttagacttggcctagttttcttactgcccagtttcaatgcaaaaagtcaaataaatccagtggaggatagaagaaacgtagggagcaaaggaagtgaaacaggagatgaagggagacggatcaaaaaagacaatgtacaagacagaatgaagaaaaggaaagaatgaaggaatgagaatcgctgatgttataaaaaatctgaagggcaataacagggaatgctatttatttttaatttgcatgctcaaatggagggtggaggaaagttagtgaaacctaaagaggcaaacagcagcagtacgggtactgagaattaagggtcactaagtactgggtaccaggcattattgttagggctctaatttaattcctaaagtacatctgtaatgtagggactacctctacttgtggatagtgaacatatgcacaaagaagttaaatcaaaccaccttgggtaacattccctggcctgtatacaacatcaccatgtcagccaaaaacacaccatcacaaaaagcatagcaaataccatagtatggtatatagtgcaactcttgactgcacagacggaaactcatcagcaccggaacagttactagattccttgcttagaaggaaactcatgtaagttcccaccctactgtcttacaacatttacatagccgatttcagaattcaagcaagggctatagagcacaaaggtcgcatgcctagaagattgcttcctatgaacttagcttgtgtaaaactgctgttggttttattttctgacccagacctttccattacttttaaatgaggaagttgggaatacctttaatcccagtgcttgagagtggcagatctctgtgagttagaggacagcctcatctaagctttgagttccaggacaatgaacaaaaaactgagatctgagttctagctcttataatgggtggagagatgaaattcttttgtgggggcttagttttggggttttgggttcttgagacattctaaactagccaaatcattgttaagattacaaagacacagtagtcatttcccctaagaattcatccaacttgacttatcaatcatctagtcaggaaagcactccctgaagatatgtaaataaaatggaagaaataactatgggattaatgggatatgtacttacacaacctagacatctctgcatccatggtgatgcttggagaccttgactcctaagcctgcttacttttctgacctctaataggaagagtctaacttttctttaaccctatttctctttggaatcaagcccaaatcctacggctacttatcttgatgctctgctcagcatgtttttctctctgtgtctctgtcttttgttgtctctgtgtctctttttctctctgcctcctccctttctctccaaagattcccacttgctatgcagttgcttacagatcttaattgctctctgttttctgagttctacatcaaaagtagatgtaaagggggtaaaaggggtaaaacttttccttttacccctttctagtttctcttcggatcctgcttctgctcacaccttggtggtccatactcttcttccaaaagaccctctccctcacccactcagctgctcaaacactttcctgacatttttttcagatggtaataaatggatcctagctcttccttctggattgttgtattaaagtcattttatcaatttgatcaagaacccataaaaataaatctgtaacaaaatgaagtaatctgtaagaattaaaaaaaaaactaaaatgtcttctagagtctacatactatatagtttaatctttgtagagtttccacagggaaaatactgaaatgtaaagcaaatcaggaaggattacttcagaaacagccatctgtaaccgagtagttcattgcaagttctcaggaagtaaattagccaggagtaaaacctgtcaaactgatagaaacttttctgccaaaatccatgttgatgtgactcatccagcataaacataacatttcctcttactgaacagtgatttggattttcttctgccttctcttctcacagccagcatgacgaatgagaatggtctagcttaaagccacacagtcaacataatctaagcaaactgaagtatgtttgaaagtcttagagttacatatgagttttctacaatgatccattgtgaaaacatctcaaacattatggggttcagcaaaacatgcttactaaaaggataaactagaaactgcttgtcaggactgacttcctgtttctgtgctctgcagtaatcccaccccatctgtacttctgcttccagagtttctgctcaactgtagcaacaaaatgctaacattcaccttaacactttcaagaaagaatacattcacacaacttatattgtagtatgctgatataattattctactttattattagttaaccttactggacctaagttgttgaccactgtctgttgctttaggcatttactggtagccttgaagtgtgttcctgtgcctaaaggaactaaagactggaaatatttttacaagaagagagtattgcaatcagcaaatacaaaggaatagataccattttatgacccaagagagaaaaatttgtaagaaaaactattttgaaatctgggaaaagatacatgtatacagtttgtatgaataaaccttaagttttgtaaagaaaacaatcaaacaatcgccaagtatctactgagcaaaataaggtgagtttgccacgtggcctgtatggacattattgagctgccaattttcaggtgaatcccaaagattatgctgaagcctaaacaggaatgctagaaagtcttggtgaacagttttaaaataatttatttattttttaagttccattttacattccaacttcagttctccttcccaccacccattcctctttggttaactaagagaatgataaaaaatatcaacaagttcatttagctacatcaaccagttcaattgttgcatcaaacgggttgtttaaaaggcagatctataactcctagtactataggatttaacatacaaatacaactaacatgcatattcaaaagaaaaatacataaaacagacatacttttttcaaaaatgttattacattctattgattgtatatgtacatatacatatacaattgtgtgtgggggggcacatgtttgccatggtatttgtgtggagatcaaaggaaaacttgcagaaccgggttttctccttcttccatgtgggtcctggggattgaactcatgcttcaaaacaggggattgttcaggcttggcagccatagcctttacacaccaagacacctctcctggcccagaagtaaatattcatgaaatgatttctcacctaatggacaatagacagcataggacagtgatctttaaaagatagtacatacaacaaacagtaatagaaaagagggagccatgcagacaaaacaaaacaacccatagatttgtggaaaatctaccctgctactcagcaacatactatcggcacatgtatataaggcaaaaatctaggaatatgaaaattaaaggaatcaaaaaatgactagcacttcacaaggaaaaatacacaaaatctggcatccatttaaagattgtcaatccaatttgtatgtggtggctcacacctgcaactcaaactctagggagacaagtcagaagatggccacaagttcaaggccagcctgagctacacagcaaggccctgtctcaaaaagtgaaaatcaccaagtcgtggaccattatcccttaaccctagattgtcaacagaagcagcaagtttgaggatagcctagtctacatagtgagttccagactaaccagaactacatagtgagaacttgtcttagaaaacaattaacctatatatgcatatataatatgtgaatatataattttatacataacaaaaatatatactataaatttttatctgtaaaacaaaagttttaataaatattaatgcaccaaaaaatggccatatttgtggtaaagtagatctataatgagaaaagaaaatcaatgaaatctgctccagatattaaaattagtagactaagcattaaaaatttttaacttgtcccacatgttgggaattttaagtagatcaatagatgggagggggactagagaggaaaatcccaatgtctaagcaaaaaattcagttaaaggactaatggcaaatagacattagagatggccaccagaaaacatgtgctacagaaacttgataagatgaaacacaaaccatacaaatgaaaatgaaactttaagcatgccaaaaaataaacaaataaaatcccaaggagcaaaaaaagacaagaagatcaaagataattaaaaggtacatcgaccataatttatacaatttgattaaaaagaaaatatataaccaactaatccaaaaagcacaatgcaggccagcagagaatgctaaaccaaagctcattgtaatcaaattgctaaaacctaatgacaaggaaaaagcattaaagggactggtatgtaaaagatgaaagactataaaccttactataatactaataaaaaggtcattgtagttgtgtcagacaatgtagcctcaacaacaaaacactacctggaatgaaagaaaaaaaatcccataatgatataggggccaactaatcaggaatcagaattaataattctgatcatttattcctgtaaatgaaacagacaaagccacgatagcactcaaaaatattaagcttctctctcaacaactgatagaacatggaggaagaaagttagtaggaattgggagccagaaagcaagaagacagagaacttgaactctcaatacaaagcaatatgtacccctctcaagtgtgtatggttcatttactagaaattacaacctcaatgaatgtcaaagtatttaagttacagaaagtgtattcactggccacaaaagaaatgtattagaatggagaggatgccattgatgcccttcccctataatgagattgatgtctacctttcctagagccttcattcagtagctgtttgaagcagaaacagacacccacagctaagcactgaaccatactactggaatcaggttgtgcagaggaaggagggaggagcaaaggagggatacttttgcagcccagatacagcaaagagggcctacgccctcccccaaatgatgtgatagactttgaaggtcccccttggagggcctcactatccctggggagcatttgagggtggattgggtgtttgtggggaacatgggaggatgggaggtcaagggaatggggggatggatatgtaaatatgagtagtaattaaagaattaaaaaaacaactctgagataccatcttactcctgtcagaatggctaaaaccagaaacaccaatgacagtttatgctagagaggatgtggagaatggggaacactcctccactgctggtgggattgccaacttgtacagccactttgaaaatcagtatggtgattcctcaggaaaatgggaatcagtctaccacaagatccagcaatttcactcttaggcataaacccaaaagatgtacattcatacaagggcatctatctgttcaactatgttcatagtagcattatttgtaatagccagaacctggagtcagcctagatgcccctcaactgaagaatgaatacagaaaatgtggtacatttacacaatagagtactactcagtgggaaaaaacaatggaatcttgaaattttaaggcaaatggatggaactagaagaaaccattctgagctaggtaacccagtcacaaaaagacaaacataagccttcatccagtagctgatggaagcagaagcagacacccaaagataaacactgaattgaactcgtggaatccagttgcagaaaggaaggagtgatgagcaaaggggtcaagaccaggctagtgaaacccacagaaacagctgacctgaacaagggggagctcatggacacgagactgacatctgggaaacaagcataggactgatccagaccccatgaacatgggtgtcaattaggaggcctgggcactctatggggactctggtagtagatgagtatgtatccctagtatatgaatgaactttgggagcacattccacacagagggatactctctcagcctagtcacatgggggagggtctaggccctgctccaaatgatgtgacagactgtgaagatcccccgtggaaggcctcaccctccctggggagctgaaaggggatgggatagggtttagtggggggcaggggaggaggggaggtagagggaactgggattgacatgtaaaaccaacttgtttcaaatttaaataaaaactagaaaaaaagaaatgaaaatcaaaagatttgggggccacaggggtggctcaggagttaagagcatatgttgctcttgcagaggacctatattcccttgccagcactcacatgatggctcaaaactatcatgagctcaagttctaggacagtattcccgaccttcctaatgctgaaatcctttaagatagttctgtatttgtggtgaccccatccatagaatcattttgttgtaacttcacaattataattttgttattgttatgaatcataatatgaatagctgccaattatcttaggcaaccgttgtgaaaggttgtttggcccccaaaggggtcatgtcccacaagtcatgaaccactattctagaagatctgatgcccacttgtggcaccaagtatgttcatgacacatacataatatacttctggaaaatcccaaaatatttataaaaataaaacaattctaataaataactgataaatcaaagatgaatacaaacgagaaatttgaaactaagtggcaataaaatcagagtataccagaactgcaggatgccacacaaacactaggaaggatttagagcaattgatctcttcatcataaaattaagttctcaaagacctatagttgccaccttaggcaaacaaaaacatcaaaagaaacagaaaaattgagtgaaaataaaaccactgtaggaaaaatgtaaaacagttctttgaaaagataagtcaaataattaagattaaaaggaagaatattgtaaccaggttttattactgtattttactaaaaatcaagtacacagaaacttccaaagtcctgagaaaactgcaaactgctgattcttggtacatgaaagggaaaatagaggttggaggatttatcatgggcatagcatatctaagcctggggcatatgtttactgccttgactatggagacagttttgcacatatgcaaaagccagcattatgctcttcttaaatatttttggtttattgtatgtcagtttttgtggtatctaataaacaacaacaatttccatttacaaggattaacttttaatgcactagaatatacaaattcacatcacttgttccctctcaaattttaaaactatccaagggggcagagtgtgatggaagtggctttctcatattacatatgaaagtatttatatctagactttactggggatactgattggacatatttgcagttaatatatgggttaattttttataatctctaactgtactgagttgcattccttgttttagcaaaatactaatatagatttttatgccctaacaaaacgaaagtgttgtataggtgacccactgtaaatgagaaaactccaaatagataagccccttaggttgatcttttggttttagagcaatgtcacaagagaaaacatttgttaaaatgacacaaagtgaaaaagaggaaacatcttattttcatccgatttgtaaaccatcctctattataacactcctactttgggctatgcataagtactcactggatagtagttaatccctcaaatcctaatctttttaaatcaatagggaaacacgggagactttttcttaattacttgaacaatttcttgcaaatactctcctctaggtcgctgaagcttgaagcaagaacaagagtaaggtagaacatcacattccatcttgtgtgtgtgtgttccacttcctatttgactatggctactattgccaatgctgacagaagaaaaattttcaccatctaacgaatattaccatggaagaacatgtctaattcagtcataaagattaaagtttaaggcgggagagatggttcagtggttaagagcactgattttcagcgcccacatggtggctcataaccatctgtattgcgagtctgaaaggatccaataccttctttaaacctccatgggcaccagacacccatgtggagcatatgaatatgtagggttaggcaaaacaccgatacgcataaaataaataaatcgtagaaaatttttctttagagaataaagtttagccagttgaggtactgcatacctttaatctccgcatttgcagcagagacaggcagatctctgtgattgtgaagccagcctggtgcaagttctacaccagccagttaaatggtatagtggtttgcatgaaaatggttcccagagactcacatttttaaatgcttggttcccagttgctggacctgtttgggaaggactgagaggtgcgggcttgttggacgatatgtgtcactagggaagggctctgaggtctcaaaagactcctgcactattcccagttcgctctctctacctccaatttccacagtgagatataagctctcagctgttcctgccaccatgaggttcctcaaattaaatgctttcttgtataagttgcattggtcagggtattttattacatagtgagaacctgcccaaaacaaaaaaacagtgaagtttagcagtaactgtctgtagactatcactttcaactccatgtgacactaatgatacctcgcatcataagttaatatttaccttaaattgaaagtctttgttctaaggttcactgtcaactgctcaactgcaacgctattgtgttccacaaaaatgaatagtctgaataaatactatgtggtctagatttttttctacatgataaaatttatcagtaagtcatggtgggatacatacttaagcatgacactcaggagatggaggcaagtagatctctgtgagttggagccagtctggcttacatagagttccagatcagttactgttacatagtgagaacctgtctccaaatatacatacttacatacacacatatatacgtgattatcagaaaccatatccagatcttcgcaaaaatttaaattaatatttaattatatattttcctatgcactgcaggaaaacaaatttttagtgtagtgacaacacagataacttgtcacttgactgtatagccaaagaaagaattgtctgagtaaatacctcagtgagtaaagtacttgccatacaaacatgaggaactaagtttagagccctaataaccatgtaaatccaagcatagaagtgcaggcctataataccagtgctgggggtggggttgacaggtggatccctggagcttgctggccagtcaggctagatgacacagtaaactccagattaagtaacagaccctgtctcaaacaaataggatggactgcaatagaaggtgcatgacatggaactctgacttacacacacacacacacacacacacacacacacacacacgtgagcacactcacacacacaggtgagcctactcacacacatccaaactatcacacagaaacagaaacagaaggacagagaaaaagtagtattttccttgataagtcaataaccacaacaaaataattaaattaagaatatataattttaatacttaaatacatacaaatatatgcacatatacacagagagaaagacagcaagacagagagagaaatttacctacagaagatggcatttggagaacatttttgtcccatttcctaacaagttccaaatgattttacctagttgttcttctgtcttctatgttaaagtcttcaagcaaacaaacttaccaagccacaacataattattcatcaaatggcaaagagaacattcatcaagtttattggtttatcgattgatcagctcactcattcatacatataataaaatttcagaaatacttgcgaaaatgccacacactgtgtcagatattggagacaaaacactgagctgagaaaatgaaagatggggcatgctttaagagagcctataacaaaaaaaaagaaagagagagaccctatcaactagtggaagaatagatattaaagagttatacacagagccaatgaagtggtgtataccatgtatacctcagcattcagggggctgagacatgaagatcaagacaagttcagtaccaacctggactacacagggtgtctaagccagcaaaggctacatagtaagaccatatctaatacctcacctccctctaaaatagaataacacacaataacttgtaataactatgaaggaaatatatagtaatagaaagtgttaaactgagaacttaaatactttttttaatttttaactttctttttatatgcagaactcttgcctacatatatgtgtatataccatgtgcatgcctggtgcctgtggaagtcagaagagaatgtaggatcccctctgactggagttacagatgggttgtgagccactatgttggtgctaggaactgaatctgggtccctctgaaggaacagtgaatattcttaataactgaggcatctctccagataataatgattggaaattacatatgaaaaagaaatactagacgcagagcatacacaatccttgatacagccacctcgaaaggtattttagtaaatccctacaaaactcaaatacactcataggatgatccagcaactgcagtcctctacccaatttagctaaaactgaagtaggttcctggactgcaacaaagtccccacactggcataggatgctcataggaaggaaggctgtgtaccctgtgaaggctgaagttatgtaccaactccttgcgctttgattttgctacaaacctaaaattgctgttctaaaaaaagtcttttaaaaaataaacagaacctttaaggtcagaatttaagttagacactgctacaaaaaccagtgattgcaaatgctgagaatgcgtgtccatcaaggtaaaggaacagtgtttaaactgaagaataattacacggagtatggacaagttcaggcttttgattactccaggtcgacccttactatctcttctcacacgcaaaaagtccgaaatacatacgaatctttgccctgggtacacaattgcttgtgtaaacttgtaaatatgcacacccacagatacacacgacatacacatatacacgcatgcctaccattctcatacaggctagccagaccagggtggtcagcataaggagatggggaaacactgcaaaatcaggactcctcccttttttccttttggtaaatacagaagaaggatagagtgcaaaggggcaattataaaatatctaggtggactcacatttatcttcattgtctcaaataaagtacacattacacaaacaaagatcgaagatctcttacacagaaactaaaaatagtaataattgtattgtgatggtaagaacaggaaggaagggtggtgagggagattaatcctcttctatcagagaaggaagtcaatagacaatatctaaaacagataaaggaagacacgatggcatataggcataatatttgtagatatgaaggaaactactagaataaaagtgttaaaagtctacaggaaggtcaccattagcaaacacatataagaagggatggggcatgagttagcactttttgtcacaaggccttctgtgctgtaactataattatgtacacagaatgataaaataaagatgttttaaagagaaaaaaggatgtattaataaaactagcagaggtgtgtatatatatatatatgctcatctgatttgctcagctagcttttgagagatggtattcaccaccttcattgggctggtctttttctatcatctggagaaaaaacatgcctcataaacatacccacaggcaatccaataaagccaattccttaattgtggttacctcttcccaaatgtgtcaacttgacaagcaaacttagccatcatgaattgtatatgaaattcacaaaaataaaataaaacagcaacaaagtgaattaaacatcagataaatcatgttgaagatacagtgggctgaggaagccaaaggaaacacaattaagaaacaggcagatctcggtgagtttgaggccactctggtctacaaagtgagttccaggacagccaaggctattacacagagaaaccctacctggaaaaagaaaagaaaaaaagccaacctcgattagatgcatgaacagaaaatgtgtcactgagtagattattctacataaaaactgtctcgatatagatgttttaattttattttacgttttatgcatattgatattttcctgcatttatgtccatataccacaaaaggtgatttttaaaataaccaagttctttcctcataattaagagttaagcgactacacagagatgaagagtttggaaagaagaaatggccatgtaactggggacaatgaagaagtagcaagttgttggagtgggagtcacagcaagaggagcagcctctaaacagagagcaccatgatacgaaagaagagttagagaagcacaaagataaaccgactgatttgaaaatatagattagggtcagcccagaatctagcagaaagaaagggactttttctttgttcctataccatatggcacacgtctgcttccacagatcaggctgatgctattaataaagcagctaatctgcaatgtagattaagtaggattcgaaaagggggtgctgctaccctgggaaagcaacctccattcagaacatgttcccaaagaaacaatttcttgcagataaaaacagaaacaaaaaaaaagtctggcaaacacttcttacaatacagcatgctcccagagtctgcagattaaagaatacacacagagcagcatttgaaatgcagaaaagataaagggaaagannnnnnnnnnnnnnnnnnnnnnnnnnnnnnnnnnnnnnnnnnnntaaatcactgtgtcatcatggtgtcctactgcaattgccaatctttgctaatctataacccctttggagggaaattgcaaacacctccacacagggactctgtatgtatctctgccctagttagcttaaggtagaggacacactgttttctgtctattcttgccagctacaattgagtagatatttttctttctcctgcttgcattaaaaaagacagtagaggttttttagcacactttttcaattcatacatatcttcaggagattctcatatactccatccaggaatcaacttctccaacgcagaagagcatccaccctccacagcaagcaacatctcagtaccgagcagtgatgtctcacagccacctactgtcctgtgtctttcatcaacttcacctcccaacattataccgtgcctgtttgtagggagaagaaaaagccttgcatgagccaagtgttgaagggtgtgtgctgttgacacagacacagccatgggccataccaaggaacccacagcctcagacctatgggaatggcaaagcctctccaacccctggggtgaggcccagagggctggcaaagccttaccgtggtccatgtatagatattgatagtgtgagcagaaagtgtccaccacagctttctcccctcagatatttataatctgaaatctgctcccctacagagactactcccactgagattagctaaacttgtcatccttgatttagttgtgtgtcataaaccctggccccttgcttaactgtatgtagtaactccacctccttgtccggctgtgtgcaataagccctcttctctcttcaactgcatgtaataaacacactgagcttccaggatgctgtggtttttccatcagagagaccaaaccacctacccgggctttcctgtgtgtctgtgttatctgtcttcattctcttgctgccctagtcaggtctgtccctggagctgtgcaggacatggcactgttcttcagactcccatccagttcctaccccaaactcagtcaatcactaacactgttcattcccaaatactcttctttttccccctcaagaggctcagtgcccagcatcggaggctcatttctctaggactctaacttctcttatatttccaaccacctatctcacctctttgcaaacatttctcctcactatttgaaatatatggatcctgcagctgaagacctgaatgcataaaaattctgagtatgtatgatgtgggtcagctgtagagaaataagtatcagttaactgacttaggctgacatgcaggttagggggtggggagagtgttaaacactagagcacatgcccccctcacagatttcatttgtatggagtggattactacaacccaggaagaaacatggagccattactgtaaacatgttctgatgactcaagagaaccgagaaatttggtttgtacgtgaactcccaattcttaaagattgcaaaactttaaagtcaacactgaaagtcaaacaaaccaaatctgtgagctagaaatgacttgcaggactaccattttgcaaaccgtctaagacatcagtggatgtcgcactgtatagtacagaatcacctaggcagattattaatgcagattcttgggggcccgcactactgaattctggttcattagattcatgctgctctagaatctacattttttagctagctttcctggtgactttgaagcaaaatggttcaatgactgttaacaaatctgcataaagagaaatctagatgaaaaggtatgaggacattaaaggaaatgggaactatatttctaatgccttcaaaatactttcattgttctcatccaacatatgcctagggaaatacaacttaatattaaacttgtttcaactctaaacagcagtgttcattcataaacacatcttcaagaaatatatgaacccaattagtactatttaaaaatggctttgttcaatgtactggacattagaaaacaacagtgtagtgataattagcactgaaatttaagatagtgttctacaaatcaattgtattttgtttattaacttattgtgtcctggtagcaaatacttccttaaaatgaaacagacccatgtcttaaacttttatttaagcccgatatatgtggaagttctgaacctgtacatactaaaatccatggtttcctgaatgctaaagtgttttttttttttttttgcaattctaaatgaatatttgccccttggcaagtgtgagagtctcacacatgaacacacacacacacacacacacataaaggaacaggaagacgttcttagtgactcagttcctagcctattttgtcccatattattaacccttcctgtgtataaatcccagccattcataagtcacttactaagtgctgacgcatacttttattctgtctactaacgtcaatttcttcctaacaaataccagtgtttcattcctaactttaaaagctcaagatagcatttggaaactgatagatattatatactatcgtgctatctatgggaaaagtgtacgatcctagtaagcaaaataggagaagaggttaacacaggaaatgctcctgactgacagttgtaactctgtggtatgaagtcatatggtcctgactgggagagacattcctaagaagcatagtattcatggcaccacatatggctgtccctgagaaagaaacaaaacagaaaccactctgagtcattattgagcttccaattcccaaggcaacatcagtaagaagagggggaagaacaggccagacagtatttttggctcaacataccaggggagcccctccacaagggcctttcatatggctatgtattttatgtatttataactcaggaagttcctgtcctcttcgtttacagtaatatgctttgtgcctgggaagcttagaagagatttagcaagaatcacatttctcacatgagaaagctgtcaggcacaaagtgagtcctgtatcaaggactgcaacacttgctttcagctagactgaaacaccaaacaaccattcatcccattaaaatgaaaaataaaagagtttccttttaaggaaacaccagataaacctcaaaagcctacatttacgcacatataaacacacatacacacttcagtcgaatgttccaagcaactgaacaatagccaccacaactatagtatgactcatgtttcaagtaggtttgtataagaactagacataagcacatatttgcttgataacgcagatatatacaattgtggaccaatttctattcacctggtcttatctcaaattcatatgtgaatcgaattactaattatctcatcataaaagttgtagtaataaaactaagccgacaatgtatcttagtaaaaaactaacctattgaagtaaactaccttaatagggatttagtgcagggcagtgctaagattgctttgccataactgtttccaaattagcttattttgtggtaggtggtccacacatgacaatagaagtactttagtgaagctagattttacccagttacatatgtcacaaatcttgtgcttctcttggaatatttcaaagacaggctataatccagccaaaacattacatatttggtttgacagcacaaatcctgtgatgtaagttaggtgacctttaagccagtacctgtttgtaggagagaaataacaagagcttgacttaggacaatgcaaacttgagaggaacagatctacagaggagcgaggtgggagaaagggccaattaagttgctacaaaactaagtcatcaaaatgcatgctatttatggtgtgtctttaatttcacaggttcaaatctgtcaaattaaaacattccaatgggtatcaaaattaatggacactctatatttacactgcaaacaaggcaattaccacaaagttttaacaagagtttagacttcatgatatttccaattaccaaaactcgagtaaggtctgattataagctccaatcagcttcaattacactgtcctactccccctactcacttgctcaaatgctatgcaggttacaggaagaagtgcaaagtgtttgcgtgagcatctgatgctcactgtggttgagccacaatccccccatcttgataaacagctactctcatacacatatcccagcctccctgaaatcctgcatctttgctcaaacatgtcctcattcttagcgcccttgcaattttgccttgtatgctgaaagtttttcctgaagattcagatggaaataatgtcccctctggtgtaatggtattagaaagtttctggggcctttgaatgacagtaaggattggacaagagatcactgagctctcagccatgtgagagtaccacaagaaagtaacagtgtgtaacccacaagaggaccctcaacagaacctatccatgacatcctgatcctcgatttccagcctccagagctgtataaactaaattctgttgtgcgtaagccatccactctacaatgccttcctatttgtaagcccatgctgactatgacacacatactgttctcgctgaaggaaatgcttttcctcgctctactacttgttaaaaaacaatctccatactttttaagaagctttttatccatatcttcccagaaagccctccatgctattttccatttaaagtgaaactcatctgtgttcccaaacacctttacccctgcatctgcactgaaccacaatccatcctgtaccatgtgtttagaacaccatattctccaattctgtgtacatagcagccagaaattgcttatcttagccctaataatgcttacttatcttaatgctgaggtgggctcctataaaacatttatgacatttgattaattattgaacaagaagaatttcaaaggtagaattcttccaactgagcagcttgcctaagcaagttgtcagtagtaaaaataaccaggcatatctacaaattgaatgtttggggaaaaggcccagaaaatctgaccacactattcttcgtgctccgggacccagatcaaacataccatctgaagaggctctccagtctctattgggcacactatgtggcactgcaaacagcacactactcatcatacctatttattatttacattacgactttacagtcacctctctcttttctcaataggccacaagtttctcaagagtaagacctgtttgtaactgtacttaggccctcagcctgaggcctcatacatagcaaggagatgatgtccatggaatgactatacattgtagcatgcatttataatgagcaccatggttagtaagactgtgtgggctgcaaaatgaaattgtaggttgaaagcaaagaaagtgatcatgtcatctgtaagcaggtaaaatcagtttaatgattacatgaagaaatggatggaaaatacttagactccacaagaaaagaataaatgtgcaagaggagaggttattgcaaatacgtgggatgatgcagtacatggcttaattaaatgaaggaaaaacagaaaaggatgataattagagttaggtgcctaatattatcctcaaatacaaaatagcctcagttctggtgagctgagcacaaagttgaaagtgactttcaatggtcaaatagggaagttaaccttgattaaactggaacagaatcataaaggtcagtcggtaactactaacaaagaaatactgtcggctgataagtgtggcaagggtaaacctcaacttcagagggtaaacttgacaaataccacatgaggggacagttgggtttgatgtttcttgcagagtagaatattaaaatgaacactgtcataaagtattttcccttttaatccgtgtgcagtcgaaccaaaccacagcccttggcttgccatggcacagtctccaacagagatgtggacggcaactgaagtctggcatcagctccaggcaggtgttatttggggaggcattctgtttccttaattggtgtggagagatgaccaacagggaaaatctgtgagacgagagaaaggactaggactttggaatttaacaagtggagaagcagaaggtaccagagaagccaatgtcacagagtagaaaatacacacagatcaccaggtgtggtcgcacccacaattaatcccagcacttgggctgaagcaggaagattgtgagctcaaaggaagcctgagcaacatggcaagaccacatcccaattcaataattaaaagccatatagatgaagcattaagtatgtgcagcatcaagagctggcaagggctcaagcaataagcaaaatgaaaatcaccttttaaaccccgtaggaagagaatacacattttccttagttgtcagaaatgtgataagtgataagaagtacaattcataacacaaagctggtaatagtccagtccagcaggcttggattagcaggaaggaagaagataagaatacaagttgtgagggccaatgatatgactggtacttccttgaaaacatggatgccctgaccctatctcaatacagggcagaggacaaatggcaaaaggagactatctagctaccaacaggagtttttccacactaaataaagaaaaagtcagatctaaagcaaggtcttccagcccttcaatctgtctcaaccttgacatttggggctgagtacctctttgtgtagaggacatgtcctatgcactgtaggatacaaaggatcttcacagctgctacacactgtatactagcagcactgtctcccaactctaaactctaaaaatgtctccagaaattattaaatgcttcctgggaattaaaactggcacacctagagaaccgctggtcgaaaggcgtgtgtgtgtgtgtgtgtgtgtgtgtgtgtgtgtgtgtgtgtaaaacttttggagacagaggagttctatgccctttcttatgtgcttgtccttaacacaggttaaagctttctggatttgaagtcaaaaataaaaggagaatatgagcaaccagaactaacatggtgaggtggtttgaattggattccatgccccaaccctgccacacacctggtctccagcatttgaacacttacttggtgcactatttatgggagtttgagcactatgttgctgtggaatattattttagcaaggtgagggtgtgctatatttgtttatgctgcagaataatgctgtaagtgtgtaaggatgtgtcacttttgttcatgctgcatttgtttcaccttgcccacttaaggcacctaatttgtctaagggagagctgaatggcaataactaggcagagaatgactaggtggggctgccaggcatagagaataaatatgagaagaaatccaggctaaaaatgaacaagagaagaggggagagaatgaggggaacacaaccagggcaagaagccaggttaaaagccacaaggcaaaaaggcagagcaagaaaaacagtttactttaagttaaaagagctagccagagtctaaattaggccgatcatttgggcttatggtcgtagcttggcacagtatgactttgatgggacaagtatgtcactgaggatggtcttagaaagttaaaacctcaggcctcttctagcttgctctctctacttcctgcttacattggaaggtgtgagctcccagcttcctgcttcaaacagactacatgcatgctgcttgatgccatgtcttcatgccatgatggactcttatcttcctacgaccataagcccaaataaactgtattctagaaggtgccttgacagtggtattttatcacagcaatggaaaagtaactgtgtacatggattttgagggatggaaaaacttgaaaactaaaaacaataaaattcttcatctgcttaattactagccctctcatcatgtctatccttctctctcaagcatggtaaaaagttcaatgaaaagaaccaacatggaaattttagctcactaacattagtaagtgtcaaattaccatagggtatcccataaaaatgcataaacattatgtctcattaatttctaatagtgatcataagtgtgaaatagcttgactgcaggctccaggcatacagtgaactattcatgatcgaatttacctattatagttttttttaaattaaaggcactctttttctttttggagggatgatgcttaaagctgaaagaagtagagcccaaactacattaggcactcgcaattatttggcttttaagcccacgactaaggcctcttactaggcacacaccaacgctaaaatagtttgtcacaacactttctggaaactaattaaaaaaagattgcatttggctgcctgtaccacacttttatagcagccaatctttaggcaaagcagacacaggaagcagcaggagaaggtaggtggttcttggcacttccctaatcaagaaacaatgcatatcgtgtacttgtgtaataggagccagcattagttttccaaggcagttttgcctcacagaaaagttcacaaacaaacagagaatggggaggggaaagaagagtgaagaatgcaatgggccttgccatgtattctgttagaaagcactcaagtataaatggggagaaagaaagagaatgtatcaccatcaatggcagtgctaaagcacagcaagccttgaggtgactcagaaattatgtaataaaggtcaaactaccaagactgctatttttaagaactgtgctcgtgtagccttaaaatccacagtcatatcccttctgtgcccatggcacttttgcaaatggtcacatatcttccccactatttcatggcagcaattcaaagaattttaacttgggattttcagtaacattgaaacaaatggcccctgaactctgtcttctaaattatacataaacatggtgcaaatgtgggccaggtcccaaacatcaccagtccacggtactgcaaggtcttctggttaatttagagcaacccggaggtttaggctcttaggcagtatagaaaaatgatgggttaaaacatagatttttataatcacattgggcctaaatgccaagttcactgttgcagagtctcaggcaagttactgagctgctctgagcctttcttgttccctacaaaccgatgtctgtcagggtgaaatgtgttaatattcagagggagacaatccgccatcaatcctagaccatccttgtacattacaggtctgtgtgtcaagactgaaaggtgctgctgggattttatacaggctatttcccagggctttgtttgtaagaagtggttttcagaatgaggtaacatctcccaatcccagcaaagagcaggctgtgtgcttgtcactattaaagtgacaaatccctcaagtgttcctctgctatagtacaactcacttcctgtacccatcatccaaatctaccctatgggacttaagattaaggtgaacccgagtattgtgttgacatgttgctattactttttcagtgatagtattctttgtctctgatcaagaagtcttaggtattcgtcaatgatctgtgaaattggaacactgggtacacagtataaaatctcacactttgtataattcttaaagatttatttttaactataagcatgggggtggcacgtgcacatgagtccaagtgctcaaacaggcactggatttctggagttacaggccaccagatatggatgctaggcatgaaacttgggtcctcttgggtcctctgcaagggcactggtccaaactgataaaccattccccaagccttctttgtatggctcttcacaaatagatgcaacaaacccagaaacataacaagaggcatgatgttgactatcactgaattatctctcaatagcctgagcatttatttggttaatgaactacagaaatgtctcaatgcctagaatgacctagaactaagctaacactctctaaagggaagtatactgataaaagagtgttgctatagccttcactagatagaataagtcagattctagaaacaaaactataaagatgagatattcagtttttaatattcagcctaaacagtgatctttcataattcccactttcaatgtaactaaaatctagatataatgcatttgtgttaaggcagattcattaaagttcttaataatctttgatccttaatatgtagaatctgaacgaagcccattcagatcatttatttctacccctttgttgtacagagaaaaaaactgacagcaaaaactatagaaaaaatgatatgaccataaatacattttaaagttaattcatgtcttagaaatctcctcaaatagtcagaaacaagctttttaaacaataagatgacacacatatcctacttagctcagttcaactcttactagcataggaagtacttttaactactataaaatatagttcgaggtcttgaaaacttgtactgtatgttaagacaaaaatggagtttccactagttcatggcaacatggctggtaatgggcatgaatgagaaatgctattacagaaatatctgagacattcaacaagtgatttaacattcaatgacaattcttctacattgatagtcttcaaaaaactaataaacatgacaaggaatatgatcttcgggattagtaacattcaagtaataacattattttaaaggacggagggagttaaaagccaggatctgcaatgtaatacaataatataactcgatccataattagctatagcagaactggaaggacaagtgtggaaacctggcttacagccctgtgcaatcactactttcagttacaactaaaccctcatttcatttgatatagagacacagctacttagaatttaggatgtagtctcaggccaactcagcttatataaaaatgaatggtttagatctcacaagagcatctgaaaacagtttgatagagcaactttaggctgtactgaagagtcaagaatttagagatcacagaacataggtacactctgttttagtaacacaaatacacaaataatctgagctgcccaacatggataaaatccagacttttttttttcttggcctactaaacttattcttccatttaaagaccattagttattcaaccaaagggggagaaatgtaaactactgcagtgccaatgacaaacaatctgtgagtgcaacctaagaaaggttattttcatgctaaatgttttatatacacagggactcttctgaaaaacattgatttcataatgaaaggtaccagactgcatagcatattataagaagctctgtctctgccaatcccatcttaacattctgtatgttctcgccttgtatcataggtgatgtaaatgaatatacatgcaagttacattacaaacttcaaaaaagtacagtcttatccatacaatccatgactatctaaagctctctgaaaaaaaataatgtcaagaaaatcactgcgaggagtagagaaagagcagagccttgctgaaccccaaggacacagtcatccatctatgaggatttcagaattcaaaaccaaaagcagtcgggtacattatattacatagatatacacataatatgcttattacaaatgaatgacaactgaaatatacctattctagaagactggagaggtggctcagccgttaagacagcttactagtcttccagaggacccaagtttggctcttagcaccacacctggcagctcacaagtacctataaatccatctccagggatccaatatactcatgcacatacaaacaaacaaatatgcataattacatataaagaataatttaaaaaaacacctactctatatgagatattcaaccattccctgtgcttgctgaatttccttgcaagtataaaaatgaaatcaatttggttttaaatcatcacccaacccacatgagatgtctgtatgaaacagaaaaatactccaggaagacagagccttatgtctggcatatgttggcaaatagtgtgatctccatggtctgataccattgtgtagggcccaaccctacataatgacaccactctattataccatacatgttattaaaggccaagatataaaagcacagtgccttgctatctacagatagaaccttcctaaatagctcgggcaagcttaatatgctattaaacatttcagattttaccagtgattaatttcaaagcacataaaacaacacatccagaactttccttcccttaagcaaaacaaacggagacaaagccagctatctaaggagccccaacaattatcactcatttatgtgtttagaggacaatcacccacttgactcagtcagtaactgctcagtcaagaaggagacatagattacaagaatgaagttatttaaaagttcatgaagttagagaaattatacacccaattgcctctcagctctgtaatagcaccaagctggtatctacagagtactggttatacaatttcttaaaacagtctttggagaatccattttcccaagttgatccactccacccatccacagcacaatcacctcattaatataacctggtttaaaacaatgataattctgagtttctggcaaagattcactggcctggtcaactagatgcacacttagagtatgtcaatgtgactaattaacaaagaaagttatctaaggtgacaaattggcaattatttggtaataaaagtacagttagcaaactggggggtgttggtgcacacacctttattcccagcactcgggaggcagaagcaggcagatctctgtgagtttaagggcagctgagtgagttccatgacagccagggctacacagaggaaccctgtctaaaaaaacaaaaaaaaaatggaagtagtaatctaaacatgttattgtgtgtgcatgttgtcaaataattttatgcatcttttatatgtatagaattcaagaatattttcccatttgcccagctatctatagcacttctggcaaaaaaattcttccacataaactccacttcacaatcacaaaatgaaaaaaagtgaagtcagaagtctaaatttaatctattttctatggtacagagtagctattccagtctacttacacttgtacagataactctcatagttaattttacagaattatagacaaaggtgaacctatttatgtagagtaactttgaagaagtttttaacattatttaaaggtatatttatctaaggagtttggtgctatatacattaattatgaatacattagattaagaatcaaattaattttgaggtaattgaggatacttgattatgggtttcaacactagacaacaccaagcattgtattactattttaaagatgggacagtggcatagtgattgtttttaagaactcagcaattttagagatgcagactgaagtctgtaggagttaaatgaaaagatatctggagtgtgaattaaaatcctctagcaaagaaaaaacaaaggaccgatagagtaaatttagaaattctagagaaccaactgctctgtctgagtaataaataaatggtaggtcaccatattacatcctctttttagtagttttgctatgttttaaaatatttcaacttagttttacttttctcttaagaccaacaaattaggtgtacaattaaaattcctcaaaatgttgaatttatcaaaacatatggctatctttaaacaactatcacagcacaaccaataactttaaaaaatgattgtgggctgaggcagtagctcaggtgataatagtgtttgcctccctttcatgaattaattcataggcttaattcctattgtctcgtaaattgtgtattattggcacatgttggtagttccagcaatcaggaggcagaggcaggaggttgagaagtccagaggtaccctcaactacacagaaagtttgaggccagcttgggctatatgatattctgtctcaaaaataaaggactgtaatcaaatcctcccatcctttaggcaagcatcacaattactagtaattgagtcaatggctattgtgagtaatttcttcctaatgctgtgtttgacttgcacctagcttgtatgaatcaattagaagcttctcacttatgagaagcaccactttatagagaccaaatgatagaaatgggaagccaatttactcaaggttttggtagcaatggagcaccctcttcccagagcaattcagtaaaaatcttcactaaatcaaagacagtgcaaatggtaatgagttaaaaattgtgttttctgcattatttcccccaaaatggcaccaatgtcttcttccctaggccacccctttcaaagcaagtattgagattcagttaaggttctgtttaaaactatggtcaaagtatatcatttgaaggtaaatcagattcagcctgatggggtaataagttttaacttggagagaatatatttcttcctatcctgaggttcacaataaataaccatgtgaaaatacatatcaacatatacatgcaccaattgtgagctgtcttccacaatgggtttccctcatatgaggccaagttaggctgaaagattacaactatgttattatgtcatgtaaccttttctgtcttcaggaaaaaaataatatgacatacttctcaaatctggcagaaggaatgagagaaatctggatcttcaataataaccatttcaatgctaaggctaccaggtaatatattaaccagatgtgctgattcatataaattagcatacattactatatactttttcagagcatactggtatttacagtgttttttaagaacaggttagaaatgagtaagatttcacttacatgacatactgctactggcaaagttcttagtacttacagtgaaatctaaggaggattataattataaattgttcaaaaaggaacaaaagaagtgagagactgaataactttttacttttaagagtccctgaagcataatgactcagtgctatagataacttctacaatagaggtgatagcttttaaacttatctctaagtcagtccccatagcacctgaatgactcagtttccttatttgcacaagatcactaagctccctgacaagacagtatgtcatacattcctactgaatttaaaaaatattcaaatgcctgaaattgatcagttcaaagaaaacagtagacattttctttaaaaattcagagtgtgggatagagagatcactcagtggttggaagcgcttattgcccttgcaaggacctcagtttgtttcccagcacccacatggtggtttcaaaacactaagaaattccagttccaggggacttgatacgaccttctgacctgtacacacaccaggcacatatgtggtgcacacacatatatgcaagctaaaacactcatacacataatataaaataaatgaacctaaaatttaaaaaatgagtgaataaaagttccagtcacatctacagtcactcagaagaaaggatgattagtaaatggacaggatgtgcaatgctgcaaaaacaaagggaactggagaggagagcaaggattgagcccaggtcctcatgaaagcaaggcaagcactctaccgtggcgctatgccccagttccataaccacatttgattcgggtgatataaggggctaacagtaatatatattgctataactttatagaatttcctaaatgtgttcttaatgtttactgtattttatctaagccatgttgtctggcaaatcagacacacaagatggcatgcttttgtagttccagctactaaggggattgtgacaagagaatcacctgagaggtcgggagttaaaagatagcccgggcaacagaattgcaagaccctgtctcaaaaatcaaacaagcattttaggcaagaaaccatatctctgtagggcagacattaatcaaagtgctgaaatttctggtattaatgctcaccagagaacacaagcaaataaaagacagaaaagacaatggaacccagaatttttgactctacaatctgtatcatttttagcttgttgtgaagcctcctagtaacaacagcaaactgttacttggtactttgtaatatcagtactatctctctgcatgggagctccagctctgacatcagaagaatctaaacaaacaaggggaggagggagtttctcatgaccctgaagaagttgtttgaaattctaactcagagaaaagacagaggaaccaggaatggaggctcagaccataatccatgcatttgggatatggaggaagacaggatccagtattggccagctcaggagctacttagtgaattcaagatcagacaaggctctaaaaaaaggactaagaagaaacagaagaatggacgggaaagttcatttgataacatacacatgtacatacaaacaaaaaaatagcacataaaagataacagttaggggcttgggatattgatcaatttatagagtgcttgcctagcacataggaagtcctgggttgagtcctcagccttggcaccacataaaccagatacagcatgcaagcatgtaatctcagcagctgaagtaaaggcagaagaataagaagttcaagatcatcctaagctatataagggttcaaggccagcctggaataaatgaaacctcatctcaaaaagaaaaacaaagaaccaccacttttcttttttgtttttgtttggtttattgttgttattgtctcttttcaacgatgtaactcccaatatatctgattatagagaaaaaaatccctagttaataattgatggctgatttataagaataaacaaaaaagaggagccatgtcgtgaagcacttgaaaatctctgtaaagcaaaatcagtatataacactgaaacttatggcagccaaatgttcagaaggcagaaccccttcctcaccaagatgaaacaaccagtgaaggcttaaaggaagaaagagagcacagaggtagcggctaggctataaaagcactgcaattcattacagacaaatgagaaaaatgcttccaatttggtgagactatccagggtggtgtcgggagcgagatgaaatggggattacaggaataaagagattccgatgcagggcatacatgagcagcaactagaatccaggactctaaatggcaaactccaccacacgactctgctcctcctcacggaccttctgcctccactccagcatccctttccaggaatttttccacaggtctaaatttctttctgaaagacatacctaaccagggaaccttagcattttaatctccccaacaacttagtcggacctttagaaaaaaagtcgaaactccaacatgagacacaaaaatctactgtgacctagagcccatcccgttgtggccagatccacaaataaatataacttctttttgtttctgctgggtcttttttttttttttttttttgtatctagttgaacattctttatcagcatatttcgtcatctctctacctttgtatatgctgccatttttttttatctagaatgcctttctccccttcttaaatcaaagctgtgttcaagccttggtgcacatgtgtactactataagccggtctcttttttaacttttcagttattctctgtggctttcacatcatgaatcttgatcccattcatctccccctcccttcatttctgccctctgtccttgcgagctccacccaaaaatataataaaatttaagaaaaaaaaactcattgtggaagctgcagtgtggcccagtgagtcattcagtaaacccatatatctttacttgcaagtgttcattgcaatgagtcactggtctggttccaggcctctggtttggcttctgctgcattatctatactgggccctcactgggactcctcttggatatcctgttgttgccctgtatcaggaagatcttagatcctgtaggtttggatccataggtccagccccttcacatcctccaacagatcatagatagggtggatgttggggtgggccaactcatagccctggttctgggcctgggtagttgcatggttggtcagccccccacctcacccccatcctcaccacccagggtgagctctacatcaataccccagaggcagcactcaggaaagcaggtgctgcaccttaatacataaagagatagttttaaaaatccaatttggtgggggcagtggtggcatacacctttaatcccagcacttgggaggcagaggcaagcaaatctctgagttatagtccagcctggtttacagtacaagttccaggacagccagggatacacacagagaaactctgtctagaaaaaccttaaaaaaatccaaatccaatttgactgaaatgcccctctgtaacatttttatagcacccccatataattaactcccttcctcccttctctgcttcgcttgactaggagtattatttgaagaggaggtctcaccctatagcccaggctggcctcaaatgtaagatgttcctacttcaagaatgctggatatacagatatgcaccattatccctagcctgactgtgagcacttcttgtcaccaaacatggaagttatggtgaatacttggtaatcaaagtctgtacataaaaccattaagctcaaagcatcgtattgaaaatcaaaacgtagttcaattacaaaaaaatagccaatactcagttctcagttatacagtaaccagaatattagtgtgctagtatagtaaacttttagttaacagttaaacactctaattctggcttcttctacctctcacacctatcagcaaaagttattaacttaatttcactgtctaaagaaagcaacaactattatgatatctccataaatcaggcactagggaaatgtctggacatcaacaaagatgacaccagctaactatctcagcaacagaggagaagctaccttaaatgccctcccctgattatgagattgatgactgacttatatgccttcatccagcagctggtggaagtagaagcagacacccataactaatcaccaatctgaactgggacccagatgcagagaaggaccagtgaagagcatgaggttcagaccaggctggtgaaacacacagaaacagctgacctgaacatccgggaactcttgctccccagtctgatagnnnnnnnnnnnnnnnnnnnnnnnnnnnnnnnnnnnnnnnnnnnnnnnnnnnnnnnnnnnnnnnnnnnnnnnnnnnnnnnnnnnnnnnnnnnnnnnnnnnnnnnnnnnnnnnnnnnnnnnnnnnnnnnnnnnnnnnnnnnnnnnnnnnnnnnnnnnnnnnnnnnnnnnnnnnnnnnnnnnnnnnnnnnnnnnnnnnnnnnnnnnnnnnnnnnnnnnnnnnnnnnnnnnnnnnnnnnnnnnnnnnnnnnnnnnncctcaccatccagggggagcagaaaagatatgtgacaggtaaggttttagttggggggataggggaggacgggtgggagaagggaactgggaaagtcatctaaaacactcctgtttctaattcaaatgaaaaagttgggggaaaaaagcaacaacttcagaaattatacaagaagaaaataaaaatataaaagtttcaactagtgtcagactactctatatccaccatcttgtgatggaagatggaggtcttagatacagtttaaaaatgtcctcctcactctcgctcccttgtcgttcgttcgttcgtgtgtgtgtgtgtgtgtgtgtgtgtgtgtgtgtgtgtgtacatggggttgtacttgtgtacataaaaatccctcagaactgggcttacaggcatcttgtgtttgccggtacaggcatatatttgtagaagccagaagtcaatcttggggtcatttatcagaaggtacttcctttttgagagtctctttcaaaggattatgggccccctttggttaggctaagctggctggcctgtgagctcctaggatcggcctatcttctcctacccccagcactgggataaccaatgagtgccgccagaccaggctttataccagatcactggccatcaaactcagtcctcacatttgcatgcaagtactttaccaactgaactgtctaaccacaacattgcattctctgaatggttaaatcattgctttaaatatgtgagatacaagatagagcttctcccttacacttctctagggcactttctctcctattcagtttaacaaaatacaagccacagttgacatcaaattactaattaatctaatattcatgctggttaatagcatgttacagtctgggcctaaccagaaagttacataaaatccaaaactctaatagcaatatatcatttaaaatgtcttgtgttgttgaaagaactaccttccctgatagacagatggatgtatggatgtatggaaagtggggggggcgctcattatgaagatacctatctgaaaaaaataactgaggtgaaatctgttaaaatttgactcacacaaccttaaacagaaatcattacagttctgaatggagaatgtgaaaaagttctcactgacatcaataagctgaggatataaatgtcactttgtctgaaaagaaatacaccctatattcttgttttttccaaatccatgagcaactaaaagagatgcaattgtatcacaagacatatagttaaaaaaattagactacagtgatccagtaaattttgtaatgtgacagaaacttccattgtggctgaacagtatatagatattgctatctaaactttttattgcatcagggttttcttgcatggctcttccttgtccccaatgctttctcttctccctttatcagagtcctcaatcaccctactgtcaccttttttgctgccttttgaaatgaaacagttcttttttttcctgcaagtcatggatgcttgtaagaaacttaacagaaggcaagaaaccaaaaaaaaaatgaacatactcaaattttttcatatattttgaagagctttgaacccttaacagcacaataacccagacaaacaatttctattgccatacgactgttttgttatcatacaggactcctatacacacactcataattgggaattattatagtgatacataatatagagcattgacattttaaaatctaaagttttctatttgcaaaactttaagttaaaaatctcaggtgaactcattcgaaaagtttaccaaatcatattgtttggtcaaactctttggtcttaaaatgtgccttacatggctgaagagatggctcagaagttaagagcactggctgctctcccagaggacctgagttcaattcccagcaaccacatggtgcctcacaaccatctataatgagatccggtgcccacttctggcctgcaggcaaacatacaggtagaacactgtatacataataaaatcttttttataaaaatgtgccttactgcattcttatagaaatcatgcaaagctcaaaaatatacttgggggaaggaagaaaattcatgtcagtattatgctcagggttccagtatttgagctactgcatcaagctatgttcactatggaacagtgaagttagctgggaaccgaaagtgatgctatctcatggctatctagttaccttgtcaaatcaagtaaaatataaaagatgaaataggacaaacagccaaagagaaggaagaatattaccacagtgttcttattaattgagataaacatttttcctttagtatccttgaaagtggaagattcttactagatgtataaaactactatggaaactattccttaacttctcttttcaattaaactttttactactgatcagagtagtctagactggggcaggtaggggggcgggggaagaaagatcactctcttaccacaaactgactaatttcaaagtcagttcattaaaacttcgactacttggttgcaaatggtggttcacatgctcaagaggccaaagtaggaggatttctgtgagtttaaggtcagcctagcctacataataagttccagaatagccaggactatatagaaagaacctaaaaaacaaaacaaacaaaaaattctaaatacattaaactctagcaatacactcagaactgtttcctcgaattcattatggtgcagatactcattaaaactgtgatagatagtacagacaagttaaaaaaagtgactcagtttctttatttgtaaagaaaggctggaataacagggcacattaagaagtaatttccataactttctcaggtttgtatggaattgatgagattttaaatttgtaagattaacctagcggaagtcctttcccacataatggaagccttcgtatgtcctgatgtttgacccctgtttccccatatgggcagtctgtaataggaaagcaaataggagccaaaagagaagtgtaagtccagaccaaatggctagatgccacaggaaatggtttgagttgcatgacacagtctcactctctcttctattataatcaagttgttgctttacagatgaaatatagacatgcaacatgtggcttgtgcttgggatgtgaactaggaatcttctgctttaaagggctcatgagaggctgcaaagtttatgtgctgaatctgtgctcgtaacccctttctccacatgccactgaaattagaaagtttacaaaaagaggaacccttttaactgatgagctgaagaaaccccagtatttcccaaccgaacaccaggccccatagatttcnnnnnnnnnnnnnnnnnnnnnncaggaaatgaactactacttgtctacactgtcggggctgtcagtcacatcaagggtatagggctgcttttgagcattctcaatcaagtggaaacactgtagcgggatattgggggagcgggcctcccgtaggctccactcccacgctctcctcgaaccacgcgcttccgaagaaatgtttcttgagtgagcacatggtggtgtggaggggggggggaaggcacgcaggcgcctcttccttggatttctggcaaagtcgaaggacctgggaacctatgtcgtgcttgtcttgatttacttagctgcgagttggctccaatgtgtttgaaacggagcggagggaggttcccctgccctggaccccaagtgttaagaggccaaacagcaactgacaagaggtgggagggaaatggaatcccgaaaagaaggttcgcgcccacaagttagacaaacagccctacccagtactctaggacaggacgcggggtgtccccaagtctgggtggggcctttctcctccgcaagctgacacgagagagagccggggtaagtggagaaggggtgctcttccgcgcccacgcagtccccgttccccgagttgcgcggcgagagcgcgtttgcagatgggaggggggcccgggtcccccgcgtgttccacggcatgacgatccggggctcttggctcccccaggctgcctggggttgtgggagcacttaccaatttgggtttgtttttcgtttcttcttcgttgaccgcgcgattccccgcgctccgcttgttgctccggccggattcttcgccaccgcctccacctccgctcccgccgccgccgccgccccgagctgctccatctttctctggccctgtcacctgctgccctggaaccccacgtctcctcaagggcaaaagcccctcggagcgctcgggatgccccgcgtccacagagagggttgcccgccaagcgccgctcccaggcccctgggtctcccctatcccaggaaatcccgacgcaaccacgccggtgccaccactccgctctggggcaagccctgcccctaagcagctgcaatcaccacggccgcctccgccctcagggcggtgtttagggtggaggaaaagtaggtgcctatctctttaagacggcctcaacacacgtgattcatcaaagtgcccgctgtcgctcgcccgggcgggcaaaagcctcttcctactcttggtgctgagcgggccaggctactgagcatgcccggagcggcgactggagcctcacagaggacattctgtggtggttaagcactgatttcacttcctgatagactagcaccaaaaggaagggaactagtctagacggataaaggagagcccattttagagacagggaaactgagtgaggacaattctccggtgcattttactgatgaggccaactgagtctcaactttcactagtgttggtcaatataccttccttagtcagagggccctcagggggtgtgctcttgctacactctgtgggaaggtttaattagtaaggcaactggcaacgtgtaggaaaaccactgggagttctgattaattgccttagacagattgtatagnnnnnnnnnnnnnnnaaagagtgagtgcttctgttgccatgattgcactgtggccaaagaaatagtcattgctttcttcccagtctgttagtggttaaagccactagtgcctcaccaagtaatccttagggtgatattaggctctttaaccaaagcacctctttacactttactattgagctgagttctatcttcgatttcccaagctagtttaggtttagggttattgtgaagagtaaataagatcgtgtatgtcaaagtgttgtttaaaagataagtccctagacaacttctagtgtttttatatagcaccagcaagcagcatacatagtcctcagcccaaacgaggtccctactatttcatcctcagcaactagctttccccactcttttccaaaagagcccttccaaaagcagcatctgaaggaaccaccaaaccatcacagatgtagggcaaagtactggggaagccatttgtaataaagcttaaacaccaagtccgtaaatatgtccataaccctgttaatgaccaagataactttgggcaatggggtcttttggtcttctataattcaatttgaagttagttatgctgaaatgaatttggagccaaatgaatatagtgagcattcattaggatgaatttggtgacgcaagtaacttgaacaacagagtgaaaagattttagatatctcaaaagagctcaaatcccaccatcttctttgcccactgtttctttttaatcatgagggtaagatgtctatgttccagaagtagccatttccccaaggacggcagcaaaggagtgtgtgctctcagatacaatggacaaaagctccaagatacatttgctttcttaaagctcatgcgcaacttggaatttgatgtatattttgactttgactcattgcacacatacataattgaatttatctaaatgtcaccctacctgaaatactgagtaaaaaaaataataataggtgctacagaaacataatgaatgatatggctaacattttcacatactccctctagaagaaatgtgggtatggatcaaagggagatgccaccaagtttaagcattgcttaataatctgttcggcaaacatttttatgccagatggtataaaaagtgacttgtgttggaaggctaaaactgacctaatttctgccctttaggctactgaagaaacaagctaaatgaattgcatcatggagcaaaaataggtgatggggaacctatgtagtatatatgtcagaggcggaagagcaccttcctgaagaagataaggtttgaattaactattaaaagtctacttaaagacattaaataccagcaagctagtactacaaatgtagtttatcgtcatggacttctcagcctactgagaaaagtatttaacaaaaatgtattgacccattgctgtacaaacaagcacagagagcattccacaaaggcaaaggaaccgatgataacatgtgcaaagaccctgtaatttcaacaagcaaacgaaaaacacctaaggtggaggactgttgcaagaggagacacagcaggacataatagtacattgagcaagcagaggcaggcagatctccatgactgtgaggacagcctactctaaataacaagttccaggacagccaaagttacctagtaaaaccttgtcacagaaaaccaaacaaataaaataagaaacaggattgaacattgttatctgaacaattatgaaggctcctacttgtacacatcactgtggttttaaaaagctagggagggaaaggccttgtaatatgaattatttctctatgacatgtatttatggacttgaaactgaattgatacgttttgaatgcaacgttggtttttgctgtcctcaggcaggacgaaactccatttgctaaccaattggccacctataaaagatctataatctctacaaaaagtggaaaagtatgttcctaatgggacttgcatttggctttattgtggttatttcagaccctgtcttaagtctcatcatttgtttttcagcatttttccctatttaatgtgaaaaacaaagtataaagcaaagacacacacagcaaccattttttttctttttgcaggaatcagggtcattggtctctcttggaaactaacacacaaaaaagaaaacagtagcctcaggcaaggatactttgtcccttaactgtgaacctagggcttcagcaaacagctgtcttatggctgatctcatttcacctacattcctttaatttttttccttcttgtgacgcacaaacagacttgtggaggaaaagacgtagtcttttttctggtgccaaaaaaagaagggtggctctccccatcaactagagtatcaaaagtatactttagaccagtctctccctctagtttctcatgtgtatctttcttccgattgaccttaaagtcctccattatcttcatctaaacaatctgccattcatagaaaaattcgaggaaacacaaactagaaaaaaagaacgagaaaataactccaaggtcacagcaaaatatatttatgagtcaacagatgaccaaaagcaaacaagtgtttgctaagcataaattatgtggctaacatcaaactagatgcaacacagagttaaacaagggagagaagaggtgtcatacctcctgctataatgtcatatatatcttcctagagaagctctagatatcctttgttgttttgttttgttctgttttcttttttaaaaaaaaaaaaactatatactatagataacagggcttccagaaaatggtcaaacaagatcacttaaatttgaaacaactttgaagtcagagcattaaccaaaaagatagctatcctaataaaaatactctggagattaaattgtcactggcatttgaatgcagcaaaagtcatcaaggtaatgtctcctccctgttgtttgtccccagtggcattgaattttagtagatccaattatgagaattttaaattgaaaagtagtcaactttttaaatcacatggtaaaaggtcttcccagcttcagtgagtgctcatagctttgccacgacattacatatggttgaaaacttaaaggttgaagccattaaaccagtggatagtcatgcttaagacagcattttatactaaatacttcactttaatgtttttgtatgactaagtctgcttgaatatgtggaagttggcttctgcttacttggaagattaaagtgctaagaaaattcatcaatgaaacaattgggctttcagattattttgacatattctccagttaaataattgctagagtgttgtttgaggtacacagacatttgtaatggagcaaccttctaaatataaaaatctccttcatcactcaatctaaaatctacctgagaaaacaaacaagaaaacaaagggtcaaatgcagtgtggtaatcaaaacacttcagaggtagaggcaaaagattaagagtgcaaagtcacctcattcaggatggtttattctagtttggtccatttgcctgaaaattccatgaagtcatcatttgttacctctgagtagttctccgttatgtagatgtaccacattttctttattcattcttcagttgagaggcatctaggttgtttgcaggttctggcttttaggaacaatgctgctataaactttctttgggacatgaccaagaatggtatcactgggtcttgaggtagattgattcccaattttcttagaaactacaataatgatttccaaaatggctgtataagtttgcactcccaccagcaggggaggaatgtcctcatgactccacatcctctccaacagtgaggtaatccagactcagaaagacaaatatggtacgtattcactcataaatagatattagatgtaaagcaaagattaaccaggctacaatccacagctccagagaagctaggtaacaaggaggaccctaagaggggcatatggatcaccctgggaagggaaattagaggagatctacagggcaagttgggggctgggggataagggggaggagggatgagaacaggagagaacgagatggcctaggtagagagggatacagtataagagcaatgaaagggatatcttttttttccaatttggggaaaacattttttttaattttttatttaaattagaaacaagattgttttacatgtcaatccctgttccctctccctcccctcctcccctgcccccactaacaccctacctacccaataccatttctgctccccaggggaggggggtcttcagagtctgacatatccttcgggatagggcctaggccctccccagtgtgtctaggctgagggagtatccctctatcccaaagttcattcctactctagggataagtactgatctactacaagaggccccatatatttacgaggtctcctcactgacacccacatttatggggtctggatcagtcccatgctgttttcccagtgatcagtctggaggccctcttgttcaggtcagctgtttctgtggttttcaccagcctggtcttgagccctttgctcatcacttctccttctctgcaactggattccagttcagttcagtaattagttgtgggtgtctgcttctacttccaccagctgctggatgaaggctataggatggcatataagttagttgtcaatctcattatcaggggagggcatttaatgtagcctctccactgttgcttagatggttagttgatgtcatccttgtagatctctggacatttcgaaagggatatcttaataggaagatccattatgggcttaggaagaaacctggtgctaggttaactcccaagaatccacaagcaggatcccagctaagactcatagcagtagtagagaggatgcctgtattggcctatccctgtaatcaaattgatgaataccccaactatcatcctagagccctcatccagtaattgatggaaccagacgcagagatccacaaccaagaactaggccgaactctgcgtttccagtcgaagagagggaggagggaacatatgcacaagggaggttaagatcatgatggagaaatctacagacacagctgaaccaagctaatgcaaactcctgaactctagacccacaactgtggagactccagggaaccaaactaggccctctgtatgtaggagacacttgtgaagcttggactaccagagggccccctggcagtcaaccacaatacaaacctggtacatgagctagcttgttggagcccactccccatggtgggatgccatgctcagccttaaagcatgggagaggggctgggccctgccccaagctattgtgctggactatgttgactcctcatgggaataattaactgtgagaaggagtggactgggagtgggctggggggaagtgagggggatgggagtaggctagagggctaggaggaggggtgggtggaagagctgtggttggaatgtaaaatgaaatcaaaaaaattttaaaaagaaactgaaagaaaaaagagtacaaagtcagttactgcaaaaacagcaagtttaagactagtctagggtttgagctaatgttcaaaaaagaatgaatgaatgaataaataaataaatgaacgaagaatgagaaaaggggatacaggagaaaacaagcatttttgctgggtagttatatataatcttgacacaagctagagaatcattttgaaagtggaaacctcaattgagaaaatgttcccactagattgacctgtggtgcattttcttaattagtgtttgttatggaagggcccagctgccaccaccgggttctataagaaagcaggaaggatgaggaaggggcccaaaagcaagtaacagagtctgagacagcccctgccctgcccccactgttcagagtcccacaagaagaccaagctacacaactgtaacatgtatgcagagatcctaggtcagtctcaggcaggttccctggttgtcagttccatctctataatacccttgagtccaggttagttgattctctggtttttcttctgaggtccttggcccctctgggtcctacaatccttcctccctttcttctgcaggattcccagagctctgtaaagtttggctgtgggtctctgcatctgtttccatcagctgctgggtgaagcctctctgatggcaattgggctagacaccaatccttgcccatccttaataggagagggggggtgcaacttggtacactatgattggctgatatacctgggagacttgcctttttctgcagagaaatgaggaggagtggaggggggtgggcagcggggaggttggagggagggggggggaggagaggagggagctggacaaagtcattatttaattctaaaacataaaagaaagcaggccaagcaacctgtggggacctagcaagtaagcagctctcttctatggtctcttcatcaactcctgcctccaggttcctacactgattgcatgatctcttctctatccacctggaatcataagatgaaataaagcctgtcctctccaagttgtttatggtcatgatgtttcatcacagcattagaaacactaagacagacatgaaggcaggacaattatcttcctaactggaagaactgactcaaaagacaacaacgtactagagagaaaggatgagacaaattaggcctcaaagagatgaagttttctaagagagctgcttgcgctgctgaacttggaatcagaaatcagattggaaaaggcaaaacaaagaaaggaagcaaggaaaatacgtcatgtggatcagcctggaaatcttgatggacgatgttcaaaggctgatgaacctatgctggaatcataagaacatgggtgcggaataatactgggaaatgcagtcagcccataaccttttcccagtatgcaaacaaattggagtgtaggacacagtggtattcgctgataaggatctttagcaaggaagttataaaacataaagtgttttaggaggagttttggcaaaggtacttgagacaactttgaaacctgatttttcagaaccatgtttcctttagtagggatttcttttggaaataaatagataaataaataaaactcttcacagatcccgaatacacagcagagcaaagtccagctggctcctttggctagtactccacttagcttctctgccacaccctgaggaaatgaggtgtagcagcactgctcctctctgcctaaagctagatgaagtaagtcctaaggcctggaactcgagcagccccagaggaaatacagaaatgcccccaagactcttttaggaggaacaaaccctacttcaccacacattctatacaggaaataaaggaaaggaatatcagataaataacaattagcaaaatgctaccccaaggaaataaagactacacctaagttgggagatatcatctcaacaagtgccagatgttggcaggcagagtctgaccaaggtacagaagctaaagaaagtaattatggcaggacaggaggacttagaaggtcctggcatcaccaggaagagtttggataaactgctacaccattacagaatgtaactgcaggtaacaagcagccaggcaggcagccagactctggaagtataccagtggatgtctcagcatgaggccagaaaattaaagtctcaaaactttggcaacagacagacagaaatgtgatcaggtagtatgtaacaggagtccagtcacagggattgggattaggaaacaaattaccagtctgttgaggggtctggcaatgcaccacgtaggaaaaaaaatcactgattctaaaggaactagtaaagcagacaaagtctatgaaatgaaggcagacaggaaaataaaacttatctccaaaaccctgtcacatttccggatagctgagataagaattgaacctacagctgtaggaccactagctaagccaccaaactactgaaatcctctctgactagaggggtgatggttcccaatggaggaaaagcttatcaacaagacaaaactacaaacactaatcactactaaggccatttacatggagataaatgttaatagatttgggaatgaaagcaaataatggaaacgactgatccacacaaagttacccagaagacaacagtgccaattttttcttgggggcagggggtgagaagtggatggtgaattcccaaattcttgccccctgtggttttaaacaatatattgaaaacgaagcctttaacttttaacaggaatgaacaggatatatacatataatgctttttaacaaagaacagacctccctgctctacattcaccaaagctccaagatgttttccaggagtctcttaacagatcatgaacggtatccctccaatctatacgttattaaagcacagatgtagggatgaacagagtggggcaagctttctgtttccttgctaatctatgtggctgagagaaacaccacagtattcatgaggatatttactttgggaagtgtagggttttgttgttagtgtttggaactgctgacttgttttcagttgcttttagcttgttttcttttgagaccgagacccactgtggagcagtggtcttgatgttgttatcttgacggagcctccagtgtggtgacattccatatgcacgccaagatgatcagctcaatttagactcccttaagaaattggtaaacagtctcttgaagatgagcatacttactgtaaaagcaggactacaattgtgcaattaaaaactattgtctcttgtgtttggtggtttattttctgacctgtccaaaataattactaagtacataaaaactaaacaacacatgtaaacaataagaatattatttatatctggcaggcaatagctaggccagcctaaaacaggttatttgtgtttcatatactctgtcacatcattattttaacatccttttttttttttttccggagacagggtttctctgtgtagctttggagcctatcctggcactcactctggagactaggctggcctcaaactcacagaaatccgcctgcctctgcctcccgagtgctgggattaaaggcgtgcgccaccaacacctggcctcacactcattcttatttactcattgttatctatgcatttcttacatgttgagagaagccagttgtttaagccattcccttgctgttcacatagtggcaaatatgcctctttacagctcaagagctggcatcctgacaaaaataaaaggcttcttcccttcctggcaaatgcagatttgcgattcagttttcctaaataatgatatgacagaaaaattattatctaagacctgatctttgctattttatagaaatgaccacaaagactgtatgaagcacattatatacggtacacctctcaggactttatgcacatggagtaagcaagacaaactggagactgatttatattatcttatgttatattttacctaataaataactaagaatacttagctcttgtttatttaagtctactaattcaagatattaaaagttaacatgtgcttctacaatagcatcaaattcactcagaagaccaacactataaaacttcaaattttatttattgtgagtgtgtgtgtgtgtgtgtgtgtgtgtgtgtgtgtgtgattcagggttggaactcaagtcttcagggttgcctaggaaatgttttttacccttttaacccataaggcgtcttatggccctctttgtaaagatttacatgtgagttttcttctgtcccttttcttcttgtgccgggatctaacctagggttttgtacatgacaggcaagtgctctctctacaactcacctccatctccaattcagcatgtgatttgtggctttattagattttattttgtttttcttgtattgaaaatagatttttttcatacaatatattctgattttggtttcctttccctctactctgctcagctcctccccacttgctctccaatccacatccactccttttctgtatatcattagaaaacaaacagtcatctaagggacaataataaaatataagacaaagcaaaaacaaactaattagaatagagcaatacaaataaggaagagagtccaagaaaaggcatgcaaaaaaaacaaaaaacaaaaaacaaaaaaaaacatatagatataaagacccaattattttgcgcactcaggaaaaccacagctaaaaataaaaataaaatttaaattttcttaaaaacagggagagaaaggaagaaaaaagccccgacaagatattatgagactaggaaccatcaaagatgccactgagtcacgttcatttagctttgaccatccactgcagggcatggggccttcccttaagagtggcttgttttaccagggaaattcaattgaagaaaactaatttttcattttcaagtggttatcgattagaaatagtttctgtttagagatgggggtgggaaatgtgcccacatctcctctcagctccaggacttcatctgctgcacaggtcgtgtgtatgctgccccagtttctgtgagttcttctgtgcatcatcctgctatgtttaggaggccttgtttccttggtctcctccatcccttctggctcttacactctttgtgccttttcatggttccatgatccctgagtggagggatttgatggagacatcccatttaaggctgagtgttccaagctctctcactctctgcacattttttagctgtaagtctctatatttgttctcatcttgtgctgaaggaagcttctctgatgatggaaaagcaagacactgatctatctatgagtatagaaaaatgttgttaggagtcattttattgctacattcttttatcataacagtagtatttggtttccccaagttccatggcctatctagtctcaggttcttagccactcaagcagtgttggatatggattccctttcatggagtgaaccttaaatcaaatcagatctttattcgttattcccacaagcattgcatcgctattgtaccttcatatctttccggcaagacatcatattagatggaaggatttgtaactggattgatgtttatctttctcattaggtatcatccaccagagtcccttccagtaccatgaatattagtccatagggtgagggttctagggttctagctcagcttctctgtctttaatgagttgtgtaggcactgtctccaagtcagcattgatatgttgctttgtttgtttctttgttttgttttttattttttttgagacagggttttgctatttagcctggatttgcttcaaacctgcaatcatcctacttcagcttcaaatgtatttcagtatgaatcccatgaacccctgctcctggctcatggataatttccttagaaacaaacaccaggatatttacacactgctcctctgtatttgatttgatgctttcttgtttcaaatatatctgtaacattggccttctgctgctttgagaacagaaaggctaacaagccattccatcagcactggcagcttgacttcacaccccaatactctgtaaaggcagacctgcctctaaactctatgaaccaaccctgatttgcatcaacattttcatcctttaatccctcatcatgttgttgcttcacacaataaaaaggcctctgaggcttggcttcggtagtggccaaattcaaaggcttactgggctgagcttgattccaaaatcctcagaaaaatgttttcctgttgcattgccggcctgcatgtgggcctatggtttgatatataaattatgagacgattgcttttcctgtttcaaacttgtttttcttgcttactaccatgtagaattataataagattttatctagaatattagaatttacatatgtgattttaattcagtaatagtatataaatgaatgttgagaatgatccatatccagggcaatgtgctgaatataagggaatggtctcaatggaattactatctagtcagggcaaccgacaaattcataattacttataaaagaatgttatagtgtcatacaataagaaaagaactaagaatctggcaacttttgtagagagagaatctagcctcctaggtacgtgtatgaccccaaatgttaaaatgagaggaaactgtttgtgacaaaggaattagcattaccagcagcatgaagaaaaaatatggactgtgttagtattctacagatgctgcagtgagagataaagctggaagagcagtggaaccaagtcagagagacttgaaatgtgatcctgaattttgaatttgttctatattcatggactcaatagagacctctgtttaagaaaaatgaggaagcaggtttggggatgcagtccaatccatagagtgcttgcctaacatgcacaaggctctgggttcaatgcccagaactagataaaaataaatgtggaggcacatggctagaatccctgcttgtgggaagcagaatcaggaggatcagaaattcaaggctgtcctcagctacacagggagtttgaagccagcctgggctacatgaaaccttatctcaaaaaaaaaaaaatcagaaactgagatgagaaggtaagttaggatgccactttcaaaagtcacagtcttttgagtgggggaaatgtgcatgttaaacttgagtgctgttctctagaaacattacccaggacagatatccaggactgtgaaggctataaggagctggaaggatcaactaagataaaatctaccactaataactaaggggaaaatatagtaaaagtccaaataatgaaagtttcaattacacttcatttgtggtcacatggatttgcctaacggagtctagacaaagagaaaatatatcttaaggaaagagaatcaatgtaaacagcatacatgcatgtagcgtttaatcttattggttaatagataaactgctatattggttggtcctagataccagaggcagttaggtagtttcatcctaggcataaataccccaagctctgggacagtagaaaagaaaataaaggggaaaaaacaaataatatagatgtttctcagaatttggagacctgatataaacgacgaaagggatagattctgagatttcaatatcctgtagtaggaagagtagaaatatgagactgggaatctaataggagaaatacatttgtaaaaataacagaatgtcaagttttatagagaaaagaagcagcatttcagatgcctgccaggtatgttcatgaagattttattagaaattaagtacagtgcttctaaaaaatttctgagaaagagatgatatttgaagaaaagggtgaagatttatagtcattaaaaatattagcttgagccaggcacagtggcatatgcttttaatcctactactcagaaaacagaggcagactggtctctgtaggcttaatgccagcctggcaacacagtgagaacctgtctcaaggggaagaaaaggaaaagaaatattatttgaagctatgggagtaaaaacagttaccaaagaatagcatggagagcagtggttctcaaccttcctgatgctgggaccctttagtatagttctacatgctgtggtgacccccaaccacaaagtatttgttttttctacttcaaaactgtaattttgctacttttatgaatcataaagtaaatatctgtgttctctgatgttcttaggtgactcctgtgaaagggtctcttgaccccagtggggtctcgacccacagattgagaaccactgaggtaaagattaatgagaaccaagaaataagtctccaaaaagctgaatttaagtgtaaataggaaaaataaatcatctaaggaaaatgcataacattatttattactcatcatagagtctgagattttaatactgaatgatggccagggatgagggaaaagatgttggtaccatgatacaataacaaagattggaaatctaaaaagagaaatatttttgatattgaatggctgagtgctgagggaaaaacacacacatgtgcaggtaaactgggtgtaatggttagcagaagcagccctagacattcctaagatagaggtgcaaggatgcgtgcaggcagagttcaagcccagcctgggagacagcccagcctggaagacatagtaaggccttatctaaaaagcaagtaaacagacaacaaaaacacccacattcagacgtgtgagatggtatccaaaacagtgaaatagcacagaagctattcattaacttaaaagaagagtagtcacagaaaagtccaaaaggaagaagccttgggtaacattaaagacagaagccagtgagcagattgtggtgttttcaaaataatgtatcattggaagactgcatccaattaaaccaaaggtaaaattgctcagaacttcagttcggaaactgtttaagaggcagctcagcagccaaatatgaaagtctaatctcttcagtcaaaggatacttggtattcatcattagtcttcccctttcctttctttgctcccttctagcctttattcagcacatgttattattctccccttttggccacacctggtagccattttctgtaatataattttctgatgttggcctatgaacaggcagacataggaaagggagctttacattgtagttcaacattcatttagggaatcaaattccagcttgtacttagaatgtgccagaaaatacacaggggcccaaaattccatttgtgtgctggaagaatgcttttagtgctggaggtttgtactttataaattacattagcttcaagccttcttagatatgtgtttatccattaaaactaatgcacaaagtgcatgaatagatacacaccgagataattgtgttacctactcattggtatgtaaaatacccgaacaaaacaacttcagaagggaaagattattccggaccatagtttcacaagtttcacttcacagctagctggttccagtgctgtgggcttgaggtgctaaagcggaacactaggaagaaatcccacctatctaagggtcatcagaaatcagagaaagagacaggactggctcagggagcagataaagccttcaaagtacaactccagtgagctactttctctaacccatctccatctcttagtctctataacagtttaataagccttcccattatgaatccatctatgaattaatccactgattatgttaaaggttcccttcttcaaaggccaagctctgaacattgatgggggaagtccttctgtgtatgtttgtcttattggttgataaataaagcactgttggccaatagggaagcaagataggtggagctaggagtcatggaggattctgagaaatgtagtaatgacggaagtctccatgtgagccctgggaagagaggacacataaggcctgcgtcctagataagataagtctctataaaatatatagattagtagttatggttgataattaagactgagctagcttatgagaaatcctagtcattggccagcagcattgtaactaacataagactctgtatgctgtttgggggccctattgtggcagccaggctcaggcagcaggcggaaagagttatcgttacataacaggaactaagcaagcctgcacaacagaagcctttggaagacattcatatccaaataccaataatctgtaacgagtctttctctgtcctgccagccagctcacaaatgatgatttggagacttattattaattacgaaagctccaccatagctcaggcttgctcctaagtagtgcttatgacttaaattaacccatattttgaaatctgcattcttttacatggtttagttacctttttactctgtactgcccattctactcccttggcatctggctggccactgtgcctttcttcctctcaaagtcttttctgtccccagaagtcctgcctaacctcttcctcgctagctattggccatccagccctttattaaaccactctccgtgacacatcttcacacagtgtaaaggaatattctgcaacaataatcctttacttctgccaatatgtacaaatagaaatattttcattataataacggcaaggaatatgagtatgagagccaaatgattttgcttattcaaatagattactttttatttttctgagtttttttttctcctggccacttctagaaagctgaacagcttacatttagacagtgggctgaacaatggaaataagttcgagacctttattttgattctagacagtacattcagtttgtaacttttcagtgacactgacttggagggcgatggaacattcagagcttttttcctgtggccctaaaagatgaggaatcttagctatgctagccatctttgcacattggaacattccaacagaaagggactacataacaagccacagaaataaagaggtgattaatatgaacaatgttggtctagaactgtggttctcaaactataccgtgtcaaccaaagtattagcattacatcaaaatttgttataaataattctctttttaaagttttatttcatgctagacatatgggtgttttgtctgcatatgtatctgtgtaccatgtgcaggattggtacctgtggctgttagaagagggcattggatcctctgaaactaatgttacagatgattgtgaactgccatgtgggtatgagaaatctaacccaggccctctacaatggaaagtcagttcttttaactgccgagccatctctacaaccacagaaataaatatttttgagacatggtctcatgtcccccagactggcttcaaactctcagtgtagcaaaggatgaccttaaactgatcttccagactcttcctcgaaattactgggattataggtgtgtgtgtgtgtgtgtgtgtgtgtgaccatgtctgagtctatgtggaattggatatcaaaccaggacttcatgattacaaaggaaacattctaccaaccaagataggcaccaaccaagactgttacattgaaaactttagtgagataaaaaaatttggatttcaataagtcttccaaatgattttgatgcactgatgtttgaaaactccttaaggcagaaacaaataagccagagggctagagaaaagaacagacagaagaataaatcactagtggtggagatgtgattgaagtaagaaggtgaaaactactactgactgcctcctcaagaacagtttttacatgcagatatttcaaaagtaccaaactgcacatttaacaggcagcaatacattgcatggaaagggaagccaaatgtttagtgaagtcaggatcatagaatagagttgatgatataagacatgaatcaagtgcaaaccagcaggcactctcaggagtggaacaatgcacacggctggcagatgagggagaggcaaaagcagcagggtcaagggcagcagatgaacacattacagttgtctcagcatcatgtgaatgggtgttaaaaagaacaaggcattcagtgtaatctctgcatctatggggagtattgcctataaaactttcatctcatctgtagccctcaacggcacagaatttctcatgccaacagaaaacagaaatgaatctataagaagcaggtagctttaaagctgactcaaacggtttgtaaacaagcctttgtcatgcttcacatatgttcactaagaggccttctagtgaaagaaagaaatgaagagagagagagagagagagagagacagacagacagacagacagacaaagacagagagagacagagacagacagagagacagagagagagagggagggagagagggagggaggaagggagagagagagagagggaggaagagagaggaaatcttgtagaggatgctacctgggactggtagagacccacatatttgcagccaaggacctggaaaactatataatacctgtccaaccaggcttgatgctatggaggatgagctaggaggaagtctttggtgtgtcattggtgtctacatattcatttggacagatgggacaaggcagagagagataataaagataatgtgacagggcaagacaatggaaaggtttctccatcttgtattcttgctgagaccatttcaggtttaactagaattgggtctctttgatgaataatcccaatgaaaataatccaactctacaaaacaaaggtcaggatgtcctagctaacttaaacaccttctgttcaactgcctgtttgtgtggaatctctccagctacatgcttatctaagcttctgttaaactacttgcttccacaacggccacaagcagctgctgagctagatgccaatacatggaatttgccttcaaaactcatgtgctctaaacacttggggtcacacctagatcctggagtagctgggtgtggtcccagccagttggaatatagactttcaactgcctataaactatgtctgagtggtcatctctggtgggttaccaatagtaatacagatagcaaaagcctgcattggacatcaagcacatagcattttgttgattgtgaaaagatccaatctgactgcatgtaccaaagatccaacttccaaactgaaaatagtttgtagtcatcttcccaccaggacacaactaacagataaagattcttgattcaaatacattcttctgtctgatgcctgatttggggcacattgcttaatcatgtttcttcctctgtgaagtggtacctactttattgtagtcatcgggatcacataatgtagtgtatataaaatattaactaagatacaaaaaccgactaatatgtttcaataattattgtgagatgaagtatatgttatgatttattgcagccttgtggcattacccaagtaactgatctctacagtgccttagtttcccccacaaataaaatgaggctatggaatgatgcaactactgtcctttgcaaagctcttgctaaagtacttggcatataacaagcacattatgaatgctgttacgtttcattccctcaaatgttttgtttttaatttttaaagctttacaatttttctttttatttacttttaaatttggcatacaggccaggaacgaagacaagctaactgccgaagctttcttcttcctccacaccctcaaatccaataccccagtcttatccccagccttgcagcagaacccatacagcaatgtcccaggcctgccatcgtcaatggatcacacagatcttcacttccaaatttctgacccccactcattactttatcccagcccccaattccaatgggcattcacctggaacctgcaggccattcagatcaagggagggaaaataactacagatcctctgctccaaatccaattttccttttgctctgtagcaggccatctgctgtatcctcacctacctccctgcccccatctctagtggaacacacagatcttcccctcaagcctttcttttcccagctcattgctttatcccagtgcctaatcccaataagcattccttggaaacctgaaggccagtccaggtagggggaaaagactaactgcagaccttcaccattctcttactttctccatatcctatcccttagtttcatcaacaattctgtagcacactacctgttgtggcctcttctcactcttttcccacattcccaggggactaagcagatcctggtggaacaccctgttttccttcctcctgtgaacccccttgccactaccccagacaatccccattcctaagaatcagctcccaatacctagaaacacattttaccaggaaaccccactgtacctagcgggatcccaaaagaatctcctatcaggcaacacacagtctcaacaccttcctaggaagcagagaggaaagcagaaaccagcgtggaaaacacccaacaaagataagaccacatatcatcacctcgggaatttcaatcttccaaacccagatgccaagacaccagcacaaacacaaatcaataacagttaagacaatatgtctccactggagcccagcgactctaccacagtagagtctgagtattgcaacatagcagaagaataagacaaagtccttaaagtaacccttatgcatattatagaagcctttaaggaggaagtgaataaatgacttaaagagtctatgaaagaagcagaggcagtgacacacagccaaggactgggctgagctcctgaagtacagttgaagagaggggggagggataatatgaatgggggggtgtcaagagcatgaggggggaaaaccacagagacagctgacccaagctaatgggagttcaaggactatggactgacagctggggaacctacatggaactacaccttctatcctatcctatcttggtgaatccatgtgaagtttcttcaattcctatcatcttctctgaagtacattggtgccgtcaggagaaaacatttctcattgtcattaaaaatacctatgttattaaaacattttaaatgtcatattctgtagatcaggatatccaagaggatccccattatcagtggcatagtagaagccagaggccttgagccagaccaatgactcttagcaatgaacacttgcaagtaaagatgaatggactaaagggtaaactgtgtgactcaataggccatactacatcttccacaagattcttctcctttcttttgttttgtttgggttttggttgttttaggggatgggaggttgcaagggtagagggtagatatcagtggataagagggatgggaatgcatgatgtaaaaactgcaaagaatcaataaaagttaaaaaggtagtattcaattgttcattcctagactatagaaatacattccagttattgaaatgaattgattcttgattcttgcagcttggctaaccccccttttgaagtctagtagcttctttgtagatgcttttagattatctatatacaaaatcatgtcttctgcaagaaaaaaaagacaattttacttcatcctttgcaacctggttgcttttcatttctttttctgatgctgagtagtatagactggaatgacaattcatagtgctgaatagtaattgctagaaaagggttagacttttgttaacttcttgatttcaacatttagtataaagttttattgaccaagacaaatatagaagggcccatacatattttatacaatatacaaaaagtaactctaagtaaatcaaaagaccaaatgaaaatctaatgtatagcacacctgggataaaatatagatttaatgttcttgtttgtatgtgtgggagagggtttctctatgtagtcttgactgtaccagaattccatatgtagaccaggctgggctcaaattcaaagagatcagcctgcctctgcctgcagagtgctagaattaaaggtgtgtgctaccaagcctggcttacatgtaatgttctcgatattggtttttctatataagcatcaaaggacaatgttgaaaaataaatagatgaactcaactttaccaaagtgaaatacttttgccatttcagaaaaacaccattgaaaactaaaacattgttcatagtagccaacagacaaaacaatccaagtgttcaccaatttatatatggataagcaaaatgcactatgacaatttagtagaatatcattgagttccagaccagcctgctctacaagagctagttctaggacagcctgcaaagccacagagaaaccctgtctcaaaaaacaaaaaacaaaacaaaaaaattgactcatttgaacacattgcactaagtatagggaaccaataacagagtgacaaattatgattccatttataagaaatgtccagaagtggcaaattagtaaaagcaaagactcatcaatctttcaagtattctgagtaggtaaaagaaatgctttatttatttatttatttatttattgttaatgtaatatgtactggcagtttagagtggagatagttttataacattgtgaatatagtcaaactatacagttattgatatacacatttacctagttatttgtttgtttatttgtgttgctgggtagggtaatgtgtggagatcctaagacaatttccatcacatgggttctgggaataaaactcaggttttcaggcttagcagcaagcacctatacctgctgagcctgcttactggcttctgagctacatatttttgaaagagttatggtatattaattatatcacagttttaaaagaatatattaagtagctataaaacaaagtagtttttcttacagagcttgttgcatattataaatggtcatttcagaagtcttgtgtaatgtttgtattacatagatgtgatggcttttattgtctgtcaaattgactgcatcagaaattaactaaaaacccaacattcaccacagcctgtaggccattctaattctgtctgtctgtctgtctgtctgtctgtctgtctgtctgtctatagtttatgaactaagatctttagctcttaacaattctgtccttaagtcatatttccttatgtcatatttctcttaatttgttatacaaagactactattttgagtctattacaacaacaaacaggattctttccttgatttcatgatggtgtttacagtgatcaaaaaactcctctttccacttctatgaatgtctttgaaagaccaaagagaaaagaaacttaaagttaagaatcactggtgtatgtgagtctttatgatatgtttatcctcaggggtcaggaaaaatgtgactttataaaaataactaagctgaactaaatgcttcttgaagtgcatcataatatcaagataaacttttaagataaataatgctatctaaatgatataggacttgataatgaattgtgttaactcaccacatttttttctatggttgtttggttgttgcatatctttaggggatatgttatagttcttggcaaacaactcatgcataattttttgagcagtccttagaattctgagtacacacactctctcttttaccctccacccccacacctatacatatccctgtgtataatgatagcttaacttctagtatactatcaggattatttttaatttgggtaacatattatgcaaaatcaaatcatgaccatctttcatgctaaaactaatatatttctatagactttttgacaaattggaacatagtattttataatatattttattcaatatctatagtaagtggtttttcaaatttcagaataaaagctaaatggatgaataaattacatattacaaaaaataatgacctaatactttatgtagtggtgttaattaggtcgataattagttgtagtttactttcctgttgttgtgataaagtattcaccaaaagcaacttggggagaaaagggtttatttgagctttcactttacagcccattcctggagaaagtcagagcaggaactcaaacagggcaggaacctggtggtaggagctggtgcagaggccatgggtgttgcttaactggcttgccccctgtggctttgttcagtgtttcttaaataactcagtacctcttgccaggggtggcaaagtaccagtgggatgggccctcccacatcaataattaatcaagaaaatgcctccacaggctcgcccaaagggcaatctgatggaagccattcctcagttgaggttccctcttcccaggcgactctgcataaagttgataaaaaaaaaagagccagcacagcaatattctgtaactaatatattgcttcacctttgctggcttgctatgggtctaactaaatttggctttcaaaacttcgtttcttcctttagcagtatttaatacattttattgtgcttgcttatttatgctatttctattctttctgatctcaaaagtcttcaagggaaacaaatgtatttactttgtcaatctagccataacacctacttaagtacctaggaaagcatgggcaatagaacatgctcatggattcctcccgtggaatagacctttattttaaagggcaggtttgtttatttatttgtttgtttacttattttgagacagagtgtctatgaagccctgtctggcactgtactcacagatatctccctgcctctgcctcctaaatgctgtggttaaaatcatatgccaccaggctcagctggataaaacctataaaatggtaactcacaaattgatattatgagcaatagctgtaatagcctgactacttaatccccagactcacagcaattcagatgtggttgtgtacattggcaagccgaacactcgtaaggtgaaatgggtagaggaggcagggaaattggtaaaatgggcagacgagccaggaaaattgcttggaagggaatgggccagatggcttggagtacgtagtgtgacagaaataagagacccatcttcaataggtagaaggtgagaattgacttggaatagctgtcctatcacctccatacacacaccatggtgtatgtatgtgcacacaggataagtagatacacacaagtaaataaatacatttaaaattgcattatgtatgcatatatggaattttgtgttaatgtatgtgaaaatctgaagtaataagtgttatgtgttaaacagtttctgccaaaattcatgttgaaatcctatttaaaaatatgacagtatttaaagatggggccttttaagaggtaattaagttaaaataaggggtccaaatcaattatgacttgtgtttttataagaagagaaaattaggacatacagagaaagactttgtgaagtcacaaggagacagttatctggaagttagggacataggctttagaaggaagccatactgcttgacattgaacttttacccctcagaattgttagaaaataattatctattttttaagtcacccacttcatggaacattctggggagcgctagcagttaatacaatagcaggctaaactaataaaatcactgcaaggtagttttagtaaatgtaatattttctaatacaaaataaatgtcatggtcctataggaatattagtatacgttccagaaaaatgtaactctctagtggcccagtgtttcattgctttagtgtctttccctgtagaactgtgcaaaacttaaaggttttcctttaagtttcgaggctcttcctcccttttttcttttctttttgcttggtttttcttatttcaattcctttcttccttcttactgctctttctttctttttcttcaagaatttctcatctcatatagcgaccaaccaaaagtattacaacataagtgacagcttattttcccttttatacctcttacatgtcctagaaagccttctaattcctggttaatggaggctatgccatctgcttcgcattcattactaacttaataacacaatatgtggtccagaaaatttatgttagaaaacattgaattataaacaaaattaatatatctgtgaagagaagagctagttctttaatgaaatttttatcattctttatgttctgttttgaagtaagaactaaattaatcgtatctcaggaaagggccaggtataatactagctttgaagaggacaattgtttatatatcttttttcccagagaagttacaggggatgactaagaacattggacttattctgaaaccaaaaggtaagaaagtttgatgccatgattctaacctgatgtgcccaactctggaaggtcatatagatagattctttgacacagtaacaaagcgcattaacagattactcagaagaaggattctcatcacagtaggatatatgtatgtattatgtatgtatgtatgtatgtatgtatgtatgtatgtatgtatgtatgtatgtatgtatgccatcaatttaatgtgaaagcaaagccctgtgattccataaagacaaaagattaattcatggtttacctagttcatgatgtcccttcaagcaaggcatttctaaacttatcatgatgtatctttcttttttcttaatggtttctttattattattttttaaaattaacaacaagcttgcttcacatgtcaatcccagctccctctccctctctcctctctcaccctccaccaaccctcccttttgatttcatgtgcattcatgttttgcctgcatgtatgcctgtgtgaagttgttggattccctgaaactggaatcataggcagttatgagctgccatgtgggtgctgggaaatgaaccctggtcccccggagagccagtgctctcaactgctgagccatttttccaaccctgatgtatctttctttaaacactttttcttacttaacagtagctttcttttttaaaaaaaattcctttttatcaaaattattttttcatacaatatattctgatctctgttttccctctcccatcttctctcaaatcctctctacttctctgttcatctaacttcatgccacctttctccctatctttagaaaacaaacaggcaaattaaaaacaaatcttttttaggataaaaattaaggaaacatggaaatttttatctccaatattattaatgaattgtaaagcaaacacttggtaattttaggtagtatcagttcattaggaaaggctgataaagtgtcagataacaagctaaaaaagtgaaagcaaacccagggtaattcatggctgtgtttttgtcattagtgttttaatgaccacacccagtcaaccaaatcaagtgttcatttttctttcacggagttgaccttgtgtatgtcctgggtaacttgggaccagcttagaggatagctactcgtcttagtcatgtttggctcatttttcagcttaagtaaagcaaaacctatgaagtcaattatattcttgcaaaacatcccaatctccaaacgcttgatttcccactgtctccctgctaatgctggcaaatttaagattccaattttttgaactcatcaactccaaagcctttaggcccacttcactctagctgcttcttccaaggtcacaccttcaattactttgcacaaaatttaatatagtatttgttttgataaatgccttatgtgagtctctcatgccagtgaactgttgaccacactttgaggaacactgcccatatactaggatatacagctgaaggatgcttgagaattttttcatttgaagtcctttgttttccttgtaaaatagatgattgttttcttgccccaattccatccacacacacctatacatcccttaaattgaagtaaagcccttcatgcagtatctcatcacaagctagccaatcttattttgagtcactagagtatcttatttttgcctttaagtggtacttatcacacattgtgacaatggattgcttttactttcttaaatcatgaaactcatcagagtttggcttttgtagttttctttattttttacacattccctggatattatcacacatactcatggtttcaactcttacctgtatgcttatcagaattttgtctgcagccttcatgtctcttctgactctcagattcatacctccagttgtatattaaataccttcacttgattgataaatgtatctcctgtctcaatgttcaaagctgatcttactttccttctgtattcacaacctctatccaaagcctcctctaactctctgttttagaaaaccacctctttattcatgcagttgaagatagacacagcagtcattctacattccttctctcttctttccactgttcaaagctgtcagttctgacacatatcccagatttctgttctctacattcttctagtattactttctataaaatccagtttactgaaaactacggcagttcatggaagaactaacattaaataaaggcaagaggcaaatagttatatgtattgattcttccaaaaattgtccatgtgtatcccatttctcaagataatgattattgacataacagtagatagcagtattgctaatctcatattggattaaatatataatattaaaagtcaataaatcaataaatagcagtgttacttgaaatacagtgctgaagaaacacactaaaaacatcctgaagatatcatcggacaaattcagaatatgacaaggggaaatgaagttaactgaaccatttagattactagagataaataatactacatgctaatattatttgatcctaatcaaataaacaagagtattcttaagaaacttgagaaattttgaacacaggtttgttactgagtgttagtaaattattatgaaaaggatatgtatttgtttcgttggttttgttgtttattttctgaaacagggtctcacgtagtccagctggccccaacttcactatgtacctgaagctggctttgaacatctgatgttctttcttctatctcctgaaagctaagattacaggcctataccaccatgcctagtttaggattagttttaaaaataatcgtcttctagagattcttaaggaaaggacagtttttgtcacaaaagaaagcatctaggagtcaaaccttatgcaaagtaggaggccaggatccagacccagcaggcagcataacttgtacttctgaatttatcaagaaaggtacaggaataaaaacattgtgtgactggggcttctgtgcatagagtgaaggattgggaggtgtggccttgttggaagaggtgtgtcactaagaatgggctttgaggtttcaaaatcccattaggcccagttctctctctctctctctctctctctctctctctctctctctctatctatctctatctctatctctctctctttctctcagctactgttccagtgccatgcctgcatgtctgctgctatgttccttatcatgattgccatggacttaccctctgaaagtgtaagcaagcccccaattaaatgctttcttttataaattgcctagtcatggtgtctcttcacagcaataaaacagtgactaagataggatataacaggaacgttggactgtaattatactatgttgttcagattgctttcacaaacaatattaatgatgtgcaacttgttggagtcttgtgctttggtttccatggctaggtgtgtagactgttgtgtatccagccttctatcagcctcctatgaaaacctcagacttgaatggtgtcttagggttttattactgtgaagagacaccatgaccaaggcaaatcttataaaagaaaatatttaatggaggctggcttacagttcagaggtttagtccattattgccatagtaggtaacatggtggcatgtaggcagatatggtgctggagaggtagctgagaggatttgcaggaagcaggaagagagagtgagccactaggccttgcttgaacttctgctctcaaagctcaccacccagtgacacacttcctccaacaaggacacatctatccaacaaggccatacctcctaacagtgtcactccatatgggcccaagaagatcatttttattcaaatctccataaatgggttcctatgtatagagaagttttataaaatatatcgccacagttcacagtcaatggattttttatatgttatataaaaagttttatgtattataaaaaaagggaaaaagtatgtctgataagattccacattggaaagcactccacagcctctgcgtgaaacactctgggctgcatgccacacatgcttctttcttattttcatttgtactattgctgcaaccctgaatggcctcagcaattgacttaactgggatgaggaatggaaggggaaagggccagttacaaggacacaagtacagaaaaactgttatcaggtgagatgtgcttgctctgttggaagagccaccataccttggaagcccagggtttattagatacagttgaatagggaggcaaggttattgcatataactgagctgggaggcaggctcattattattatttttatttaaattagaaacaagcttgttttacatgtcaatttcagttccctctccctcgcctcctctgcacccccacctacatctctatcccaacccctttctgttccccagggagggtgaggccttccattggagaatcttcaagtctgtcatatcatttagagcaggacgtagacccttcccagtgtgtctaggctgagagagtatacctctatgtggagtgggctcccaaacttcatttgtgtactaggggtaaatactgatctactaccagaggccccattgattgtctagacccccaaactgacttaaagacaggctcattatatacatatgcacaagaagatagaattatatacagctgaacaggtttagctaatttgggtagaagcagtctctgccttggaggagtcttcaggctctaatcacacacgggcagaaagctttgttagtcatttctgcacacattcacaactcagatcagagggagactttgttatccctctgagccttgcccaaggaaggcttttcctctctcatgtagctgagacactgggttacttgaaggttgagcagggaggtagggctatttcatatagctgagcaaggaggcaggatcacactatatatataacaccaaaagtacatgtcaaaaatacacatttacacagaatacttgttccctatgtactatatatcttttctgagacaaatgctagtcaccagtacagcccatttttggagctttatgctctctagtgaattagtgaacttgtggttgtgctaagacccccgatataaataagaaaagaatttgaagacatttcaacaaaggaaagaatgcataagtttaacatgaaaaataaattacccagagactgatattggggttcaaacttcaagctgaatattggacaagcaaggtagttagttggccactagcttcttccctctacctcaggctgaatgggctagtcctgtctccacaagctctcaccaagcctcagactataacctctcttcagcgtggctggagaatgaatgcctcatattgcctacttgctcctgtcttttatacccctcttgtgctgggattaaaggtgtgagctataattctctttcagactggttcaatcttgagtagatctaggtgaccttgaaatcacagagatccttctatctcttaatcctgagtcctgggagtaaaggtgtgtaccaccacctcctagcttctggctgctgggactaaaagtgtgtatcaccactgcctgatctctatagcttgaggctgactttgcttttctgaatcctcagtcaagctttaataaatcataagcaatatatcactaaacttaagtacataagaaactgtctgataatactagtcaggtagaaagttcaggacaaactacaatgatgtagtaacatgcctatgagacattgactaacaataaaaatttcatcatagcaagtatgtaaggactgaagctttcacatattattgatatgaaaaataatttggcaagtttcttaatatgactggcatacaatgaagtaattctgttagtatggccctaccaaaatgaaataaaatatatgctgaaaaggactgtctacaatggatttatttatagaaccacaaaactgagaataatccaaatgtattttataaccattcaatggacaatgacctagcataccaaaagaaagaagtgtggatccacagactaacataaacaaatctcagaataaggatgctacatgaaagaagtcagaccaaaagcaaattgtgtgtatgtaagcttacatcaatttaaaactataagaaatgcaaataattcagaaagaatcagtacatttcagagtagagtaatggttcagggtaagacaggatgacctaagaaggaattttccaggatcaagaggcaaaacttagtggcagaacatgtgccttgaatgtgtaaggctctgagttcaatctgagcacctaagagaacaaaagcagcaaaaatgacagcacaaaaacatgttgtggcagtggatttattcattaccttgatcttggcaatgatatcagggttgtatatgaacttgaagacattgtgttttaaagtacatgcagttaactgtattttcaattatgacaaaatataaaatgataaatactatttatgaaaaaaatggctcaatgttgtagatcctaaattctcactggtgttcctagcaatcaaaattgtttctgctgcaagcaacagaacaaaaatagggttttcaggaagtgaataaggtggagatggctggatggcagggctagaagttagacttagctccctcactgggagctgggtagtaaggcactcattatttttgtagctggatgataggtacatagatttttattacagaaaagtcttattaatacacgagtcattagtttatacagaactaaaactcaaattattttaaaggatttgtgcactgtgaatgaaaatgagggaaatggaagaaagaggaacagccattatgctccttaaatttgtactctgtttgtgttattgtgtctctaaaaatacaaaagcagggttcataagtaaatagcagacacatataaatatgttcttcttaagttgtataaatcagttaattattaatgcagtacatttagccactttcataattgctcatcttttaaaaactggagtataaaaatgttcagacttgttataacttgttcagtttgtaaaatgatttctaaatttggaaattataagtactcacatatttgaaagctattaagtttttatttcagaatatataattttggtagagcattaagagttgaaaagaattgttgacaagctacttgtacatattatgcatcaaatatcttgtactgctattttagaggcattttcattatattagacatacccattatccttcttcacataattaaaagaaaaatacctagaaaaggagagaattcaaggcagaaaaaaggaatgtctccctttttcttcttatctatttatttttggagaatctttttcattttcatgaggatttattttcttataacttaaagtctataaatttaggaagtttcagttgatgaaagtgttaccctaccctaagtgagtgaaaaattaattgctaataaactggaggacaaagaccatagggaatcttttagtggatcccattcatgtatctttacaagtgacatcacagggcagttttatggaagaatcttgttctttatcttcaatggaacaacctctaaatagtttcatttatttttttccaaaacagactcaatatcctaaaacacccttaatatatgtcacctggtaccttccatcactgaatttacctaaagttttctttaacagaggctgtgcaggagggtactaagggcacacattgccaacaaacttgagttggaattacacatcttgagcaatacatttctttgggcatttgtctcatcacctatgaaatggagaaaagaaaagtggttacttcacaatttcattgtgcatattcaatgagaaagatttgagtgaattacatagcatagggcctctcattcaatttattgcatgtttgcctttgcattttctaggggtttataattaataaagtcagacccattcaattaattatagcctgggccaatctaaaagagtaaaatagtcaccacctacatagtgtgactttatttagaaggttgttagctctgctatgatttggatctattatgtctcccatgggctcctgtgtttgaacaactggtcccaatctggtagtgctgttttgggaggttgtggagacttttggaagtgagtcctagttggagaaagtgggttcctgggaaggatgccttgagagttatataatacagtacatttctggccccagtccctcagcctcatactctctgacacaggtgagaggtgctccttccaccatacctcctcatcatggctgtctctaccttcaaccaggaggcaaaagaaatccttcctctgttaatttgcttcggtaggtattctgtcagaaagaataaagtaaggaatactgtttctccttgctgtgcaagtatacacttctagaagaaaagaatctgctgttgatttccattcctctgttaatggacatttcggtgatcttctctgggttactagactatactggagaaactggagtccccttaggtttcttagtctcattaataagagaattaacaaactcagaagctggacaataatttaattagagtctaaaagaggaactccccagggtgggaaagttgtaaatatggtacctgcctggaggaggagaatggagaagagaaggaagaaaggccatagtatttcagctaagctacatggcaggctgcctggaggtagcaggcagtcacatagctttagataaagagtacaggagcccaaagtactggagagagaaattctaactggaactcatggtgtttttgagggtctttgctgggagtaaggaaaatgttagagggtaggtggagtttggagacgcaggaattaagaggaggaagtctccccttctcattctcctagatcaggagatcttgtccctttccccttctccaggggaccatttatgtctctcttagggtcctccttgtttcctagcttctctggcagtgtgcattgtaggctggtaatcctttattctatgtctaaaatccacatatgagtgagtacataccgtgtttgtctttttgtgattgggttacatagctcagaatggtttcttctagttccattcatttgcctgctaatttcaagattccattgttttttttttcttttctgatgagtagtactccattttgtaaacagatcacattttttctatccattcttcagttgaggggcatctaggttgcttccaggttctggctattacaaatagtgctgttatgaacatggttgaacagatgtccttgttatatgaatgtgcttcttttgggtgtatgcctaagagtgggattgctggatcttatggtagactgattcccattttcctgagaaatcgccatactgatttccaaattggcagtaccagttggctcaaatggactttgggagcccattccctaccgagggatactattgcagcccagatacagcaaggagggcctaggccctcccccatacaatatgactgactttgaaggtccttggtggagggcctcactatccctggggaggagtcagggggctgggttggggtggactgggtggggaacatgggaggatgggagggcaagggaatgggggctggatatgtaaatatgagtaattaaaaataagttttaaaaattggaaaaaaagaggaggaaagatatagtatcacattgaagcaataattattccactttagcatgattgaagatgggattcccttcctgagacaccctcacccacattcccgaggaatggtcccttggccaggtcctttgcccacccaattaactcttaagggaggagatgattcaattttccaccttccagtagagtctattattatattttaagttttctctttattatttttaattatgtgtatgaggtgcacatgaatgtaagtgtgtgatgatgccagatcccatggaaccggaagtagagatggttctgatatgtcccacatgggtgttgggaactgaactcaggtcctttggaagagcaacaagtgattttagccactgaacctgtactccagcccctagattccattctctacaacaatactaccattaaaatgccacatcttcactgactttgggtaaaattctgatgtactttgactccatgttttgtacacttaagcaatagatttaatgaagaatctaaaactattttggattctctgcagagcaaagccactgaacaaaaggcagtatatgtaactccctcaagctttatgccacggttagaaaagctgtttagtgcagtttctcaaacagttctaaccatcaaaaatcacctgcatcatttgttaaacaagtggactctggaacttggtccatttaggaaaaggttcaagaatgtgaaggtttaatgagcacccaagggatttgtaagaggtcacaagtttgaaattgttgaggaggttagaagcccagactttggaatgatactatatatgagttcaaattcaagcttctccctttggggatatctgatcacagagttaattaaccacccttaacctctgttttcatccctattacatgacaattaaatgaatcaattaatttaagacatatgtcttacaatggacattgagaattttagctggcattgttataatgttaacattgcttttaatttatttaaacttacatatgaatcttcagttcctgggcaaggttctatattgcccagtgacgatctagaactttttggtgggcaagtatgtggcaaagtctcattacacagtcctacctggaccacagtctgtaaatcactgtaataaatcccttctctctcctgctgctctccctccctgactctaaccagcaaccatggaacttgatgtgtagactagggtagatcaaacccacagatactgatctgtgtctgcctctctagtgctggcattaaatgtgtgctgtgtactaccatgccaggctaattaatattctagaactttttgcttgctctctggcatgcctttttctttggaagaaattagcttggctattatgattaagctgttgtgggtcacctttatgtttttaatcgttatgctttattatgcaaattaggcaaccaaagtatctgagggttccaattcacattctccactgtagatgtggatgcaacttgtgcctagaaagataatttttctcacaggacaagatctctcagacattaacctgagttctaacttgaaaaggcccaggaacattgcccttgaagttgcagtgtaggaaaatctttggaagattgtttgaaatttacctgctggttaacaggggatagagaaatggacaaaggaagacaaaataaagaggaagtcaaagccttttactggcaataacaaagaaaaggcaatgggactgatacagatagatggacagtgccacacagaggtagcaaggggttgggctgtgggagagagaaaaacaaagagggagagaacagaaagccagggagagctggacagaaatgaacacagtacagaaagacagggaaagnnnnnnnnnnnnnnnnnnnnnnnnnnnnnnnnnnnnnnnnnnnnnnnnnnnnnnnnnnnnnnnnnnnnnnnnngaaagagaccaacccgtactgggatgaaacttgttatatagacagacaggttttgtgcagggaatttcccaaatagttgaaggaagagaaatcaattcatctcacacaattttaaagtacttgctatagaaaaggcatggggaaatagataaggcagagtgtgataagcatcattaaaagtcaaatgctttttagtcccttgaaggaaaaaaaaaacacatgcattcagttggaggatgatgtggaagcctgaaggacaaatgaagatttataattggaaagggaagggatttttccaactgagagaatggctagtaagaactgtgaagaagcaaaaggcacatgttcaggaaaggagcaatagcttctggctaaagtgtaggctagtgagcatgagcactgcaaaagggggtcatttgtaaatgcacatgctcgggccttcctcctgggtgcatggtatcagagtgtctgagaacagttctgtattttctctacaaatcacaggtatatatggtataggaggaagtcaaaggtggctttcgttgtcacaactgaagaggtttgaaacgctatggactaaggacgtagatctgatttactgttgagtcactttggctcaggctcagtgaaccagaaaggtcatggtttgagtctcagctgctgtactgtactgagttgtgcttacagcctatgcaaatgaggccggatgacagctggagatgagtgctaattaattaaacctggttttaggtcatgccaccgacaggcagatatattttcttttttatttggagactgcatttgaaaacacagtctttttttagttaaatgggggtgaaaagaataggaaggatctgccatctgagactgtcttttgacttctcaaactttgtgttgattcctatcaagacttaagtagtttcctctaaagcagtgtcagaactcttgaattgtgactcattggtaaattatgttaggaatgtatttgaaaatcaaaaacaaggtgtacactgcaggaactctttgaaatggcatttagactttttaaaagtaaagcagaaatatttttttcagtgctatttgaaacatgagggatatgtttgtattgtcatggtatgtagtttgtgaaaccatctcactattttatgctaagtgtccttcagctatgaaaaactgctcaagggaggcctggtttgccttttccttaaccgaagaaccagaggtcaggactcctgctgatggtaaaagagagtttgagatttcacacgaacagtgattttctgttgctatttaagcctttggctgttaattattactaaaagtatagtctccttttccaattagccagatggtaaacttgttagtctgttttctgtcacggtggcaacatagttcgtatagaaataaacaacttaaaaggaagaaaccttaactttggctcacaggttcaggagtttctgtccaggatctcctgctcctgctactttgggactgcagcaaggcagaacatcgtggtaggaagcatgcaatagaccaatactgtttacatcaaggtggccaggaaggcagagccagcaaatggccattttatccaactacgcccaaccttcagaagtttccaactctttccaccagcatcatcagctggaaccaagggtttttttgtttctttgttttgtttttaaacacaggagcttcatgaggacaggcacctagccacagccttccccatattcttctgcctagtactagattgtatgtgtagcaggtcctcccagagatttaatagaattagcagtgggatagaaatgtaagaattgcaacacatcatcccagtaacgtctcattgccttcaaagagcagcacgaaatgagagaaggtgaaaatgtggctcatctattccagtttatattatatattcctatttatattttataccctgaagactgctctacttacaattgattataattgagtcacaatgaggaaaatgtatagaaaaccaaggaaactggcatagcacatttaaaggagttgagggaaagactcattccttcccttagtgtcagtaggccccaataatagacatttgaatgaatctgttcactaccacatttgtatgaaaatgaatggatggacacctactttaatgcccattacttcaagtgaattgtgtgtaaaaattgggaacaaagagaagctgttctctgtgtagaccactagggctagagttgaagttgtcttacgcaaagaagatttggcattacaaatagtgccattttataaaaagtgggtagtttagatttttgtctttttattgacacttcaaggttactaacaatggccactggtaaaaacaaggcctttctgagtattctaaaaaaaaaaaaatgtaactttcattttttcctgtcgctgtaattgtaaaccagaaataaaagagctgataggaccaccatttgggtgagaaagaagattacattccctagcttcctaaggttctgaaaaatcagaaaacactggggagatagttaaatgggtgttgtgacctagctggtatcagtcccatgctacagaggctatctattctggactgatatccttgcgggctgtgatcagaaccatccagacagccactggatcatccctgagtgggggctgtgtggacttggaaactcctagccacccaacatcgataaagaccagacacaggcatcttgtcatttcatgagggttctcagtccatgctgcaaacaggagtctctggattattctagcatcctcctaagcagcttcttaaatattggcacgtgaccgcagagaccatcttctattaactcattcctccgttggctctctcagcacacctaaaaacacatagagttctctagccacatagagttctcagcacaggttcagcacattcaaggtctagccctgttctaacacaaaccaagagatattcttcactgaggccatgccatccagcagcaattagttagcatctgcaatacaatggaggttcaggtttctgaaaatggagccagaggtttggaccctgagaaactttctaatagaaaatttttggtccccgacaagtgggtaaaatgcttgctgagttcagatccctagcacccatgataaaatactaggccttgtgctgtgtgcctgcaatcctggtgctggaggcagagaaaagcagattctagtgacttgatgacaagccagtctaactaatcagttcatttcgaaacccagtctcaaaaatagagtgatagaaaaatgcatctgatgttgacctctgactttccaggtccatacatgggtgagatgtgcattcatacacacacatatagataaaaaggaccaaaaagcattatgaaaatttgtccaaattatgtttcataatttaaaaatttaattcattggaatatttctcagaattattatcaaaagtctgtttctaagttgggctctaattattagctgacaaaatgctcatgaagtgaattcaaccccacctacacatgtcaaaactaggatttagtttcactgacagaacagagaggtgacaaaaggattgagtagggatcctagtgagatgtgcaggttataagaggcaaggaggttggaagtctgtgatgatcccaacaacaggtaattaaatagattccagttacactgtcaagtagaatgagaccattgacttggataaagagagtcattaaagagatgggaagaaacatgggatgaagatgcttgaaagtaggcttatcctagtcatgattaaagaaacattttatacatgagttctagagaaggtctgaagctaaatttgactataataaggcagaaggtcagaatgatacctacgatagagacagaagcactgatatctgagattatggctccataattgagaatgcagtaatctgtagatagttcaatgaaaccagttcttgggatcaataactgttgggaattctaaactaaatattaagattaatatgctatctctatttaaccaggtgcttactcccattcccaaacacaggaaaatgatttttttttctgtcagtcattatttctactcactgataacatctcatctcaaaatgttctctgccacacagtctttcaacaatgttcattaaatggtatttttcagatactgtgtcataccaagaggaataaaacacagacttcatttggccttagaaagcttacaggtttatgaatacagtaaccaactaaacagatgattcaggtacagcatataaaatgcccaaagaaactaaggagcatttattcattctgttaatcaaatgtatcaagtgccttctatttttaagcagtagtcaggaaagcagatgatgactttaaacctagacttgccgtgcataaaaatatatttccaagaaagccatcatagtgtgtgtgtgtaggggtggggcacagctgtatctcaggaggctaaagctggaagaccatgagttcaaggctagactgaattacacagcaaaattctgtctcaacaaataaacataattttttcctggtaaactaaatatttgttggcttgacacacctattgtttctattacatctgtaggcatatctagggtctccatatggggcgctactctaatccccactctaatctacattctcagatgctcctatggtgtataaactgtcccttctctgactgagggcccccatttacactttgccctgctgggtatattagtcttgcctgagatgacccaggctctatcctgttttcagctaggcagcaatttcaatggattgagtagtatctgttctttgggcagaatggaaacttgaagtaggtggatttctggatcttgggagcaactcatgacaactaggggggaggcatgacttgtggacataggacttgagttttggatattgctcctgggacagtagttgttggagtgggccaccctggatgtgaatttggtttgatcataatgaaggttgaagttaggatgttgatggctgggaataaacaaagcaaaggtccttggaaaatatattggggaaaattgtcctaactgacctactcatatgacctgtctcaatcagaagaaaagatctgttcctgcccctccccatggtcttattttattatttttattatattttcaagtctgggcactgtgaccttataacttcttccatcattgactagttcatgctctctctctccttctgggcctagcattttataaatatttacagaccacatggtctgtgtatttaggtctagagagctatcttggcctgtgataaaaccctagggcccacaagatgaaaggagagaataattcctctgtagctggttttcttttgggccaccaaccagctcccaaatcatgacatggagacggagcaatcattagttatgcatgcttgacctcagcttatgtttgtcctaatagctcttataacttaaattaaattaacctgtttctattcatctacattttgcttccaggctttttatcattctttcattctgtatgtcctacttcttgtctaactggtggatacctgtctggctggccttgggtttctccctctctttctccctgttctccagtttccttctcttcagcctagattcctcctactctttattctatctgcccaccagccctgcctatccatctactgtctagctgttggtattcagctttttattagaccaatcaggtaccttaggcagacaaggcaaaacagcagcacatctttacataattaaacaaatgcaacactgctttacataaagtaatatttcacaatatgccatgagcaagctattctctgatttcagtgtgtatgtgcatgcatgaaataaataaaatataattaacaaaacatttaaacttgtcttcttgctgggtatggtggtacatgccttttattccagcagaggcagatagatctttatgagttcaaaattagccaaagctaaatagggagaccatctctcaaaaaatatcaataaacaaagtaataaaaatggatgtgatggctagtcttgattgtcaacttgaccatatctataattaaataaaactcaagtagctgggtacacctgtgaagtttttttcttaattaaatcatttgaagtaggaagactcacctataatccagatcttttgaggtgggaagatccacttatagtgtgggtcacaccttctgctggcagcctatataaaggacatggaaaaagaaagcttttgctctttgcctgcttgtccttgttcttgctggaaagttcattctttcactggagttagagcttacttgttcaggattccagcatatgctaaagactagctgagacatccagcccgtggactgaataattactggattcctgaaccttcccttgggagacacccattgttggactagttgggccagggcctgtaagccagcataataaatcttcatatatataaatttgtgccttttattaaacatcatgaaatgcaatgataaacattaagttgaatattggaatttggtaatgctgtgttcaagagatataccccagtacagaaaacagtggtacaagcacagaggtaaagtcaagacattttaagtagaccaaactagatgggggcatgaagaaattgggaagagatgagctggtagggtaagttccttatagtgcaagctaacagtattgggctttaaattatgaatctttaaaaatagcttaatagcctcatcttagaaagaatatttgataagaatatttagaacgtttttgaaagggaagaggttaattgtaggcagactacattgaacacttagaatattttaggtcattaagaagaaatcaaatgtagtagaaattgaaattgatagaaaataatggagttattaattacaggtctctagaaaagaatcaaacatatcaaagagttaggatcaacacagattagatgctgaagtttaaacagaaggatatctcaaggatgacacacagatttttgtcttgggtgaccataaggttcattaagataggtacactacttacttttgggtagctatgatcaaaataccaaagagaacttatgggagaaattttttccataaagtttcagagattctgtctgtggttgcttgactccatgtacttaagaaatacattgtgtcagcagctgaagagggtgttcacatcatggcagacaggaaacagagagcaaagaacagactggagataagacttaacttttacagcttgggcatactccctaaaagccctagaacttgaaactttacagagaatatcaaacaaactgtctaacactattgacagagtaaacaagcaagaatatcacatctgtggttgtttaaatgagaattgtcccataggctcaggtatttgaatgtttggttcccagttggtggtactatttggggaggcaatggaacccttaggaggtggaatcttgttggaggaaatgcaccacttggggaaggtgttgagagtttacagcatctctccacttccagttgctctctctgctttgagttggaggttgaagacgtcatctcttagtttcctggtctgcctgacctcttctatgactcccagacattatagactcttatgttggaatcaaaagtcaagatgtaacatctttcttccaaaagttgcttttgatcatggtgtttatcacagtcacaaaaagtaactgatacaatagccaaaccataataagatatttctgacaaccaaagacaatttattcatttttctttcattctaaaaatgtctttctgaagtaacaataagatcacctcagttcttaaagttgatgttaatataaaaaaaacctcaagtctattgagagcaagataatcatattttatctttgcacaaaaatatgtctaggctgtcctttaatatccttgagaagactgataggtaaaaataagtaaaatgatactaaaacatctacaccacagaaactatagtaacatttattatatgttaatttatttcagcccagttccaagttaggtaagcagaaaatgatgaatggaaaacataaggaggatagaaatgtggtagaatagaatgttaacagatgctattttaaagatctgacatagctttgcatactttacacctttatgtgtctattgtgataactgtggcagggggtgcaggctgcagtctttgctaattaatgatataatttcaggttttccttgatacttccattaagttttttccccagtgtgtgttctttcaatccaatacagaaagctaaaaacccagacaagggcaaagagaatcactatcacctccattctctacacatagatgttctctctagttgggccaagactggattaagtactcagcaggctggcgcttttcatcagccatgtacctgacatgcaaatattactgtcaaagtctagtaacagtgatggccaccaaattagtggttgagtttggacatttgcacttgattgtataaacctggtgcctgtatttagataaaacaactatagaatggtaatcatgcttttatttaggcaagatctggcttattgctactgttctcttagtcaagtgagtctgaagggatcacttaaaggggcttagaaaagttgttgttgctgtatagatgctgtttctattctcaagcactggaagactgcttctaatggtccttgtgtgatggaagaatgacaaacacttgtggaataacgaggttcttatgagctagaagtatggattatgaagctgtttgttggattacttcagcttttatttattgacatctgaaaagaaaaactaaagaataagggattacttctaaaatttagttttgtggaggcttttcccataactgagtttgtcaaacactccttggaataatttcgggcacgaaagtaggatttgctaaattaccatttcaaggctcagagacccaggtatcaaatgtgcttttagccatctgtttaattctcatttttctgatgcagtgctcaatagtggagggtggggcatatgggttgaactataaaacagtccaaaagttttttttttgtgatctctgattacatttatcttacatccagaaggacaaaaattcatttttcttttatctttttttggtgtacatctcatcacagatggttttcatacaaatacatgatcttttcttgatttaccttaattattacctcttcctttcacttcctagggtattttgcaaaatcctagactatttctattccaaagcaggctagatatatatcagtacagaatcaaaggctcaccaatcaaaaagctgggaataagatggttgtatgcctatgaagacattatagtgatttgggtctcgaccaggtggtaaggtactagccataataataagatttacattgttgcaactttgcatggaagcagaaagctacaggaagaagcaatcatgccttaagagatgcacaacagaaaagaaaataataaaaaagaaagctaaagtcatagaaatggcctctaattccttctcatctttaaaggacacagagtcctatcttagggtcacgttcactctggactatcctagatgtccctgcttcaggctatgctctcccttttatctacaataaaccaccatacctaggagcagtcatgtcctaccttttttacttctttttcactcaatttgcccttgtaaggaacaaagctgtttaaaagaaactcaggagaaaaagaattggtcttgacaggttcaagaattaaaatgtattcatttttttctataggaccttttgtagcccaggctaactctgaattcctgaatgtcctgcctcagtctctgaaaaattgagattaaaaatatgaataaccacaccagattgttttttatagtaagaagtgtttactccgaattgttcccttttcaatgacaattgactgatatattccacatttttgaacatcttctatgtgtcagtcagtgagtggtattatttgtggatatttattgtgttaaaaacaaaaaggagaactgagcacacaaccttactcctgggatcatgatacttgtaatactgaggtcagaggtttaccttgaatttgaggccagatagacacaaggtgagtcctatattaaaaaccagtcaagcaagaccattagtctattaatgtaactccagcatccaggatcgacaggcagaggtaggcgaagttcatggccagccttgtctatgtagcagccagggctacatagtgaggtgctgtttcaaaacaaagaaaaaaaaacaagaaaaacaaaataaaaacaaacaacaaatccaatcaacaaaccagccaactgtacacacacatacacacacacacacacacacacacacacacacacacacacacacacacacacacgccaggaaaaaaggaaaagtataccatgatagagcacagaacagtaggatgaaaacagacctataagtagtatgtgtgtggtggtttaagtaagaatacctgccatggctcatatgtttgaattcttagtccccagctgatgaactgtgtgggaacgattaggagttaagtcttgttggaggaagtgtgtcatcagggctttaagggttcaaaagcccatgccaggctcaatctctcaatctctctctctctccttctctccttctctctctctctctctctctctctctctctctctctctctgtttttgaaaccagaacattttatttttatgactgactgaaatcctcaagatgaactgatgcccgtggagtggatcatgatgtaaataaagttctctcacgactgtctgcttctcaccaagataataatgcactaaccctctgaaactaagcatgccctcaactaaacattttcttttgtaagttgccttggttatgatatctatttacaccaacagaacagtaactaaaacaatgtgtatctcaccatgtagtttagatagcttcctaaagagtaggcctgttccatgtagtaagagataaatgcaccttcagaaatgcattgcttttactgtcatcattagataataaaacaacatatgtatcattttcttgaaagttggtggatcttccatttattaataatgattattataactagtgtatatgtgtaggtgcatgcaggacatggcagtcttgtagaagtcagaggacaactttcatgagtcagtttttcctgtcatcacgtggtcagaaagcacctttatacactggataatcttgttagcctgaattggtatatcttaatgaaaacacgcatgtgttacaatatatctttccgccaaaagccactgagccccactgccacgtgtgagctttacaccagccgcccacctgagttagggcccaaatgaatacacagaaatttgtattaggttcaaagctgcttggccaatgactaggacttctcatctgctagctcagtcttaattatcataaatctatatatgttataagacttatgggacaccttattggcgtccctccttgccggtggctcacatcctgccgttggaggaggcaaatgggaaaaagggacactccctgtttctctttctttaaatatgagtctccttgctatgtcacttcctgcctggatcacaacttctctactacatttcccagaatcatctttgactcctagtcctgcctaacttgccgtttcattggccaagcagaactttattaaataatcaataagataaacatatacagaagtacttcccccatcacccaagcttttaaaatattgccaattcatatctatttatcttttttaaaaaatacagagtctcatctaagtagtccattctgcccttgagctcatgggctctatttctcaaatgttgggattacaggtgtgtgccaccaagcctgaccttttaatttctgattttctgatattcctttttaaatcattttttgaagtgtgtgtgtgtgtgtagtgatctgtaggccagaggttggagttacaggtgattatgagttgcctggcacaggtgccagggacctgtccttaaaaaagtagtacatgcatttaccctctgatccacctcgccagccccgctcttatttatttatctttaatttattttcttaaacaatatatcctgattacacttttcctctcccgctgctcttctgagttcgtcagtacctcatctcccctctagatagactccctttctctcattagaaaaaaataggcttttaagagaaaacaagcaaataaaaaaaagtaaaatgtaataagataaagtaaaaactagcacatcagaattgggaaaaagcaaaatctaaaataagcaagcaaacaaacaagaaaacagaaggacaggagacctaaagaggagaggagaaacagagacccgttcattggcacactcaggaatcccacagaaacagtaaactggaaaccacaatacatatgcagggaacatggtgcagatccatgtcggccccatgcttgtttcttccatctctgtgagcccatataagccctccttagttgattcagtgggctaggttctcccggtgtccttcatcccccttgtcttctacaatctttcatctccctcttccacagggttcccctgttctgagtggaaggacccaaagagacctttgatttagactttctctccacataatgtctggctgtgggtttctgcatctgttcccatctgctgctggaggatgtctctctgatgatgactggatggataaggcactgatctatgagtacagcaggatgtcattaggaatcattttattgatttttttgaccaattgtgtttggttttaccctagggcctggactatctagcgtttggttcttggttatccaagctgtggcaggtataggtttcttctcatggagtgggccttaatcagacattggttggctactcctacaagctctatgccatcattgcccttgcatattttacagtcaggacagattgtaaatcaaaggttttgtggatggattggtgtccaccattctcttttagtagcctgcaaaatacctttccacaacaaagagactagtaggtagggatgaagggtccatgtaggtaccaaatcaacttctacatgttaaatgagttgtgtggatgttgttctcagcaatggggcctcactgtcagtttgtggagagcaaccctttgtcttagcatcaggttgggttatttggggatttccatgggacctccttacaacccagtgcatccactagaagccttgcctggctacatgagatggccagttgagactctgtatccaccattactagaagtcctcattaggatcatgctcataaattacaggaagttttctctacactaggtctctacaccatcccctaagtttatcccaattccactagtttctccatcccatacccatatgtggtccctactgctctcatctcctgtccccagtccacccataaaatctgtcctatctccccatcccaggaagatccttaggatcctcctctttacctaacctctctgagtccacagattatggcttggttatcatttatttaatggttaatatccacttataagtgaatacatactataattgtcttttgaggtctgggttacctcactcaggatgactttttttctggcttcatccatttgcctgcaagtttcatgatgtcatttttaaaacagctcagtaatagtctgctgtgtaaacatagcacattttctttatcaattctttgcttgagggacatctaggttgtttacaatttctggctattatgaaaagagtaacaatgaacaagattgagtcagtgtccttatggtagaatggggcatccattgggtgtatgcccaagagtggtataactgggtcttgaggtagatgattcccaattttctgagaacccaccatattgatttctatagtgttgtacaagtttgtactcccaccagcagtggaggagtgttccctttggcccacatccttgctagcataagctgtcacttgcggttttgatattagccattctgacagttataagatggaaacttaaagaagttttgatttgcaattacccgatggctaaggatattgaacatttaagtgtttttcagatatctgagattcctattctctattaagaattctgtttatatctgctccccctttaaattagattatttggtttcttgatatctagtttcttgaggtttttaaaatacattttgactgttagtctctattgtatgtggagttggtaaaaatcctttcccattatgtaggcttctgttttgtctgactcacagagtcctttgttttcctgaaggttttcagtttcatgaggtcccatttattaattgttgatcttaatgcctgtgctattggtgatctgtttagaaagttgtctcctgtcccaatgtgttcaaggccattctcctctttctcttctagcaggttcagtgtgtctggttttatgttgaggtctttgatccactcagacttgaggtttttgcaggctaaaaatatagatctatttgcattcttctacatccagttttatcagcacaatttgttggagatactcattttttctagtatgtttttctggctttaaaatcaagctgccacaggtatgtggatttatgtctgggtcttcaattcaatttcattccttaacatgtgtggttttatgccaattccacagggttttcattattatagctctgtagtacaacttgaaatggtgaatggtgagacctcctgcagttctttgattgttctggattgttttagttactcttgagtgttttgtttttccataagaagttgataattgtcctgtcaagaactgtaaagaattgtgttggaattttgatggggactgcatttgtagattgcttttggtaagatggccatttttattgtattaattctactgatccatgagcatgggagatctttccatcttctgatatgttttccattttttaaatgtaagcacatactgctacgatttttttcctgttagcactgctttccttgagtcctttagttttgggtatgctgtgtattcattttcattgaattctagaaagtttttaatttctttatttctgtctcgaaccattttttatccaatagtgagttcttcagtttccatgagtttatatgttttctgtcagttttgttgttgttgatatacaacttttatctgtcatggtatgataggctgcagggtactattttaatgtttttgtatctgctgagtcttgctttgtatacaggtatgtggtcacttttggagaaagttccatgaggtacagagaaaaaagtatgtccttttatgtttgggtgaaatgttctagaaatatcttttaagtccatttggtctataacatctcttagctccagtatttctctgttggctttttctggatgacctgtccattggtgaaaatgagataatgaagaaacccactatcactgtgtgagggttaatatttccttccttatctcttttgatttgttttactggaagtctattttgttatattttaaaatggctatgcttgcttgtttcttttgtacatttgcttggaatatcttttctaagcttttaccatgaggtaatatctatccttgatgttgaggtgtgtttttttataaacaccagaaggatggatcctgtttttgcaaccattgtgtttggctgtgcctttttattgagaaatttagaccactgatcttaaaaactatcagtgactaatgattgtggattcctgttatcttgttagtgtttgtatgtgtgtttctgtttgtacttcccttctttttatttttctggtctgtgatttttaatttcttttgttttcatggatgtagttaacctctttagattgaagttttccttctagcacattctttagggctgaatttatagatagatgttgtttaaatttggctccatcatcaaccatctcattttctccatctatggtgaatgaaagttttattgtctacagtattgtgggcaggcacctatgatctctaagactctgcagcaaatctctctaggcttttcttgcctttagagtctccattgagaagtcaagtttaattctactaggtctgccttacatgttacttggtcttttttccttgcagcttgtaatatccattccctattctgtgtgtttagtattttgattattatatggaaagaagactttcttttctggtttggtctatttgatgttctgtatccttcttgtacctttataggaatgtccttctttaggttagtaaaattttcttctgtgattttgttgaaaatattttggggtctttaaactggaattcttctccttccagtattcctattattcttagctttgatcttttcatagcatcccagatttcctgggctaggaggggatggactgtaggattcacaggagatgtggggggggcaagactgcgactggtgttctgtcacagtgctggtgatgagactagggaattggatttggagggaagcagtgagtcgtgagggtcttcagttagctcacctgtttccctgttctgcttagctggtgtgttcccagtgaatgcttgttggatttggaagctgggatactggaatgagttgggaaaaggaaggttgagggagatcttcctgatctgttggggactggagtcagacagcaaagggagagaccacagcatgtttcctgctacagttctggggatgagactggggagactggctctcagaaactataagagaggtgtctatctttaattttttaaaaaataatattttgtattattttttcttttcctcttcaaatcaaattcgtgttgtccagccactttttaaatactcttatgataatacttacaatggctatgtccccaatgtatccccagtaagacattagcttttgctttacatttcaaaaatctgattttatttcttagaatagtttcaggttcacagaaaaattgagagaaacacagttcttatttaccatccctcagacccccacaggtatattattggtaattcaatcattagtgttctattctagacctgtgcatttattacaatcaaggaaccaacaatgaggtatcattataacacaaagtctggattttacactagagtttactcttgttggtgtattctgtggatttggacaaatgtatgatgacatagacctacaagtagagcactatacaaaactctcccaactctaaatgacctctaggcttcatcctagtcatccctccctgcttctactgatccttatactgtcttcataggttttcacttttcagaatgtcttaaagttagacccatactattttcactttacaatatacatttaagaatatctccctctccttctccctctcccctccccctccccctccctctcctccctctccctctccctctcccccctcccctctctctccctctctctccctctctttctctcctcttttgtccataccgtttgtttttctctttctggagtagattaaagttagtgcatcctatcttgcaagttaggcaagcaccctacaattaaactacacaagcttttattactttgagtttataattccttaacactgaacatattttcatatgcttatttgacctctggatatttttttttgttaggtgtctattcagacttttggccccccctttttttttttggtttttcgagaaagagtttctctgtatagctttggagcctatcctggcaattgctctggagaccaggctggcctcgaactcacagagatctgcctgcctctgcctcctgagtgctgggattaaaggcatgtgccaccaatgcctggctcttttggcccatttttaattgggttgtttgtcttactgttgagtttcaagtggtcttatgatgtgttagatgacactcttttttatttgaagggttttgtttgtttaatatatctgaaaagaattcatatacaaagaactgggacacaagaaagcattggctcagcactgacaaatccacaagattaggactggggaaggagattacccaaacatttcttaaaattggaacctgcaaacaaaataatcttgatatatctctatcaacactcatgaagagttttgaggctcttgccatttttcttgaatgtgaaagctttagccagttgctcaagggttcctcataggcatgaaagaaaaaaaggggatagccctgactggtacccatgttggttaagtatgctccccatcccacatgctcctagcttcttaatgaagccggcctgtaacctcaccacctgaaaggagatggaagtcatcataaccatttgtcttctagcaccatcccttaaggaaccctgtgtaccaggtcttcagctgaatcaaggaacactacagtcagttgtacatctatgctaagcatataaggaaatgactgacaggggcaaaagaacgtcatttttttttattaggaactcaatccatttggtgtatttcaaaaggtgcagtacttttttcatttatcagtgaaagaagttagaaattatcccccctccccaaatcagcaaaagacaaacaaataccttgaaagtcaaagtcacatacagagtacatcctagaaagaggggcaagacagtttccatccaactttatgagtttcatcaaagactgagtccactcaagggtggactgaaaaggcatctttcaagaagaagtatgttattaaatgaggcgtttctacactccttcttaagagcaccaggtggggactcatttgctaaactagacctggggaatagagtgtagatataatctgtccttctgctaagggctgtccactggttaacaatttttaaaaaacaagaataagaaacaaccccacacacctcaaaaggagagaagggctgagggtggggggattctaagatgccccagattgctctccaaaatggaaccagggagcatctttgacaattcaaattagtctgttacaaaggatgacactctttttaacagaaatgtgttgtataaatattttcatctagtctgtaccctgtcttattcacttgacaatttccatcacagatcaaaaattaattaattaacaaattaactgaataattaatgatgatgatctattgctatgtagccagcccaggcagaccactaactcaccaccctcatatcccagccttatgactactcagattacaagcatgtactaccaaacctggcaggagttcttattttgaagatggtacatctaatcaattctctaatacatcacacctttggtatcttatccaaagagccattacttcaatatcatctacatttttctcttgtgtaaccttctagaagttctatagctttacagttcaaaataaggcctgtggtccatttgggagtaattcttgtgaaggatattagatctgtctacagatttattcatttgttcatggatacctagctgttgaaaagctgtcatttactgaaaagacaaccatcaagaagagtgtattgtattgtattgtattgtattgtattgccttttctgtttgtcaaagttcagacgtggatgtttgtgtaggtttgtttttatgctccctagtctgctcttgtctgtttagtttttcacaaatatgttattattgtctcagttactgcatcattagagttaaatgatgtcagctttcagattttgttcttctctaccaatatggtattggctgttctgagtcttctgcctctccttataatctttagaattggtgtgatattgatctaaaacgtaatgtgttgaagtttgctttgatttaaaactttcagttatgacattgagcctgagaaatacaatagataatagtggtattgtgttagccagctctgtcacaatggcaaaattcttgagaaaaagaatttaaaggaaaagaggcttgttgcagagattgcagtctatgaccagctggctggcttgatttattttatgtctttatcaaagaatagccaccatggtagaagggcatggctaagaagctgcttacctcactatagctaggaaggaggaaaagtgaaagagaggaagagaaggggagaaggagagggaagaaagagggaggaaagagatgtgggaaggaggataagtgaaagaaagaggagagagagaaaaggagaggagataggtgtatggatgcatggatggatagatagatacatacaggattattatggatatagagtgaaagggatgcctcctgcaacctacttcctctaaccaggttttacctcttaagttttccactaccctctattctttataactacctcccaacagtgctgccagctagggatcaagtattcataaacatcaacctctatgggatattcaaatccaactccaataggtacatcaaagcatctcttttaattagtataattttgtttaatctgtataatcaaagaccctcaccattgtgttccattttctatataaacaagaacatctgcagacatgttttgcagcaaatggttatattcaccagagagactaaaataaaataattataaaggctttcaaaattgttgggtaggttgtgaaacagctggaattttcatatattgctggtggaactataagttgctagaatcactttggaaaactacttgtccattttgattaaatgtaattatgtgcttaattatgatcaagatatcccaaacctgacaaatgtatacatatattcatcaagaaatgtttatcaggatttttgtagcaacagaaaataaaaacaaaatgttaatcataagaagaatggatgcttcattgccagtgaaattaacaaactagtacaaaaggtaccaacatggatcagtctcaccaagataatattgagagagagctcacacatatataagacaatattctacttcattacatttatatacatttcaaagatgaaaaactcatttctgacaatcgtgattgcccttgtacataagaatgtaaatgagtgggaaaaggaatacataagaacagcttttttaactttaagttctatttcttgaggtggatgatgaggtgcacagatccatttgctgtaaagtaacctaagtgtggttgtaaattatatacttttgggggaatgtagttgtaatgtgtcaatgttaatacttaccagtgaagtttttaagcaacctgacttggcctgataagttctataagagatatgagagcatccatggtgaggaatttacattttaaaagctttcactttttgagtatcgggaatcacaattggacagttgggtaatctcttgaggtagagattgtcttagtaatgaggtaggactggggtttcggtgtgggatactgcagcccttgctcttccctactatcactatctttcattacgattagacattctttcctttatctacttgtgcttatgctaagcagccacagttctgtttccttttcttatttgatattttgccacacagagacaatggaatgctaaatatattcacaatgtgaaaataaagttgaaggacatatatttattttaagcaagggcagatgactgtccattaacttatttctttttttgtggtgtgtgtgttgctgttattgttcttgtcacaatgcttgtgtgtgtatgttgtagtatcatgaatactttttcatttgttttagaacactttgaatacttttctaagtatttgagcaaagcaaaacattgagtagacaatctcattacttgtggtgggcacttagaggtctttcccccttaagaggtactaaatcagaatcttactggggccacaaccattcaatattttcctatgtgcattgacttatacacagaaatattcaattgtacctgtcatttttcatctgttgttcagtgataacatttgctcagtttcccaggagtgttttataattctccttacattctgactaactctaatatccattcctcttcaggttcttattaaattgacaaaatgaggacactacgactcatacatgggactcttgaacctccttattaacctttaatacaacactgaaaattggtcatttattcttcttattagatttctaccacttaaattctttataaactgtagctaaagtgacacattgtggtggtttgaataggtacggcccccatagactcatgtatttgaatgcttggcctatagagagtgacattattaggaggtgtggccttgttggagtaggtgtggccttattgggggagatgtgtattatgataaagcaggaggggaaccttggccgattccatgttgggcaaggttgatcaaggcagagggacaaacatgccaggcaaaaagagcttagtgagaagttttattaggaaggggagggacgggggaagggaagggaaaagaggtaaagagacacagcggcacagagacagagagaggacagaagagaagagagagacaggaagaatcctgtgtgccccaggggaacagcgtgggtggagggaggagaaagagtggagagtagaaagagagttcaagtgggtaggggtctttcttttaaaggggtcctttgcacctgcatgcagactatgcaaccatggaactctgggctcactagagtactgcctgagtgtattctgccaggtgacaggggcaggccagcataatgcctgaatccttactaagtgtcactatggaggtaggctttgaagtctcacatgctcaagctatgaccagtgttatacacagtgtcctgctgctgcctgcagatcaagatacggaattctgggatacccctccaataccaagtcttcctgcatgctgccttgtttccagacatgatgataatggactaaacctctgaaactgtaagccagccccatgtaaatgttttcctttatatgagttgcagtggtcatggtgtctcttcacagcaatagttcatagtgtggttactaactttataagaaagatacaaaggatgtgaagatggtatgattttcataaagaccaagtttctaccctctagagtttagctattctatttacccattgaagattataaatactctctgattgaaaaaaatgatctagtatcccagctctgtccatgtgtgtgctttcattgctatacccaaagcatcttacagatatcccctgccatgatgataatggactgaacctctgaaaccgtaagcaagccccctcaacaaaatgctttctttataagggttaccatggtcatggtatctcatcaaagcaataaaaagactaactgagacaggatctatgcaagaggagtacatgctcttaaccatagagccatctcttcagcctctcagttcattttttttaaatgtagcaataatttagaaacatacacaagaatttagtgtaccttcatttgtgatagaatattccagtttcttcatttcaattctcagagtctatgttgcagagttactaaagaagaaaatataaatttagcagtaatacacatgtatagttataactatattatacatatatagttaggtgagaagaccattaaataatcattattcacattggtaagaatagtggaccctcattcagttcaggcagatacaataaactagcaaggcttcctttgatattgaatctatatactaattatacagtagttaacaagtttaaatttgcttacaattagaaacaatgatatcattcatccactctcaccttcatttctataacctgcatgattcagttgacaaattgtattcagaactatgtagaccagggtggccttgaactcaaagaggtctgcctgcttctgcctccctagtgctgggattaaaagagtgcatcaccatacccaatgaagatttttagattttatttatcttgtatgtacacatgtgtgtatgtgttagggtgtgcattaacgtggaggttagaggacaacttttagaagttatttttctccatccaccatgtgtgttctggggatccatctcaggtcatcagactcggtgactggtgtctttgtcaactgagccatcttagtatcttgaagttttatttttaatttgtctttgaagagagatactcaaagcaatctgttaagataatagtcagttaaaggaagtggaaaacttacaatatcaagacttttatgaaaattaatctgacctgttgctaaagtcaattcctataccccattttttgaaacaaactttcatagggcattataacaaatctgcaatgactgttaaatgaataacatttttgtgccacaacagatacaaaatactctaacttccaaatccccacaaactgctatgatgccatccaataaaaaagactaggtcattgctacaatcaagtcaatttcagcattcctttcccagagctattttgcatattgggtcatacaccagtttcagtcttggagactgtctattttgggagcttccccacaatctggtgacatgatggaaaagagtatggaattataatggtaacatgaataaaaaagacaaacattcagagtttaaatgattatctttgtatagttacttttcatttacaaaggtgcattgtaagcactaatttatccatggaaagtccctgcaaacctagttatgctatgagaaaatcagagtttaggaagagaaaagtgagatttcctagcagagctatatttttccatagctcatctctaagcagaatcctctaaataggtaagtcaattaaattcctcttatctaaatagaaagcctgttcagtagattaagaaagtccattttgctcaaagcccttagggataatgcaaaacattgttccactgtaaaccagaatctcagaattgaaaaatcaagggtgaccagactatttcaagtatttggacattttcaagattagtgatagactaatgtaaagctatgtaacagtgattcaaactagaattggatgtatttataagaaaataaccagctgaattgccagatctaattccttgttggcctataattcatttctgactatgtgagtttcaatgaaaaatgggcctaaggaatgcacgtgggtgtcactgacagtcactgataggcctagggcataaacaagagagaagatcaaatacagtaggagaagttttgtggtagaagatagccaacaaaaattttaagatgcagccataatttctgtcactggcccagaaggcagagagataaatgcattagctgtgatctaggagactaaattacaagaatacatagaaggttttgttggaaattgcaagatgattaccacatataatagataatctattgttggggagctatgccaggagcaaagaaatcacatgtagacagaatatctgacctatacaaaatgtagctcaagcaatatgtcatatccaaccaggtatggttacatatatctataatcccataacttaataggtataggcaaggtggtaaattcaaggtcgtcctcagctacatattgaatgtgaaggccagagttcagatccccagcactaacataaaagttgagtgagcattgaaggccgcctataatcctagcctcaggcaatgaagagagatcattggaacaaggtggctagccatactagctaaattagatagctccaggttcagtgagaggctctgcctgaataaatagagagtgattgaagaagacaccctacatcagcccctctcctccccatgttcacatatgtttactctcacccaaataaacatgcattcacataatggaatattcatatacacatgcacacataccataagcatctacacacaaaaaaagaaaaagggaaagaaaataaattagaataagttgacatgaaatgagaagggatggaagaaaaaggatcctaagagaatgctaaattgttaagtaatgatatattctctagggtctgtgtgctcattaagaagattttggttttaactgaaagtgaggtgagattatgtattgtaaatttttacggcgatggatgactccatctaacatatattaacaaatagttatttgtatatctttaaagaataaaacacacaagtacacatgttcaataagcgaagtagtgaagagaaaactacaatacctcaatagatgtatgatggttctttggacctgggtggtagcatttgaaattgtgagaagtggctatattgaggaaatactgtaaggtatattcagtgaaatttgtttaaaacaataatactttactagggcacaattgctatatgaaaaatgtgtgtgtgtgtatccgcgtgcgcacgtgcgcgagcgagcatgtgtgcgtgccatgtgttagtttttggttgttatgacaaaataccatgaacaagacaacttacaaaagaaagagtttacctgactcatggttccagagagagagtttaatggcagggaggcatgacagcaaggggctggagctggaagttgagtgatcaccatctttaaccacactgaggttcaagaaaccatcatcacaatccattctccaaacatacattcgcctacaaaaatttattctcttgctccataggtgttgtttttgaaaggctgaagtaggaggatcatgagttcaaggccagcctggactaaaaatgtgaaattcctatttcatcacaaaaaacgaaaaagaaaatgtaaaagaaaatccatataaaatctaattatataacagtattattgaatacatttatactcttgaggtcagtatgggtgcaagagaagaaaaataaatacaattctgatgctttgggtctgatcaaataggaagatgaagatgtcatataataaaatgaatgagtcttgacaaatttgaaagactggagcctttgtgaagaatgctacatccttaaccaccagaaaactgcaaattgaaattactgtgagatgttatccgatcccagtcagaatagctatcattaagaaaacaactacaacaaatactgataaggatttatagaaaggagaaagccttttcactgttgatgggtctgtgaatggggtccaggcactatggaaatcattggggctgtttatcaaaaagttaaaagtatatttcttatgttatccagctagtccagtgctgggcatgtatccaaatggctgtacatcctcttacagagatacttgaaattcatgttcactgctgccttatttataagagtcaggaaatggaagcaggctacacgctcatcaagtaatgaagagataatgaaaatgtggtatgttatacaatggaatattattttgtttttcttaatgctgcatgttctgtctcatatatgcattctagctttgaattcttagactgctgcgtttaatctggagtgcctagagcagtcaggaacccagaaagaggccccttggggaggagggataatagaacactagtgacatgaaagtagacatagggaatacatagaaactataagcaggaaggaggaaaggacctggggcaaaggggcaggtgagggaaagggttaaccaaaaccaagtgtacatgaaaaatctgatagaaacttactatttcataaatctagtgaaatcataattttaaaatgttaggagaccctgtgtgtgagtgggtaatactcttctaagaagtcaaagattatcaaatgaaaaccccagtaccatgtgtggaaatattctctcatgagttattggtcagagaggttgaagaagcccctcaagcattacagactattgacattgctcaccagaactagattgtaagccccagttactgaagataccacacacttgtgttgcaggacactgagtaatcaaattgtgaatgagatagacattttctcccaggttgccacctttcatgaccctggaaggtgctatgcaggctgtgggagaaaagttatcaacagacttatccagctatgtgccccacaagatacaataacgacacaccagacataccactagtgcaatagtggcatgattgttatggaggccatcaatccatttattcttacatttgaggatggcttgaaaggaagaaactcatacctgggactgtaaacctaggcaagaacctgcatctggagtgcgcaatatacccaaggaatctactactgttattttactaaatgtacacagtgccttctcatgctcaggtttttctattagtgcggcttactctcagacttcatcagcgaacctcatttggagagcagccagtggtcactggagaggctcataactggtcaaagtgcagagaataagaggctgtggaatgctcggctctaaatgagtcacctgtatcaccctctccaggcctcgggaacattatagaagagaaggtagaaagaatgaaagagccagagaatggggaggagtatcaccaaagagtcttttggatatcaaatggccactgtactcataaacttactgcagttgcaaaagacttgcacagaattgggccagtcaccattttgtcatgcataggggagggactcatgaggccctatccatcactgagggactataggcagttaatggttgttgggggaggggtgccatttcctttagcaactgataatataatgtgcccatacttcagtaactagtactccactcatgctcacacaagcaaccacaattaaactcaatgggttaaaaaaaatccaagtagaaaggggcttgctaggaggaggtgtttcattgggaattaagagagcacactgaaggtgaaaatgaacaaaataaataacatgcagttatgaaatttctaaagaataaaaaatatgttgaagattttagcatgcttttagattaagtgttttgtccttggaattggttggaaattactgtttgtttctttgatgggttttatgttttcctgaattatgaatcacttaactctattgttacgtttgttgccctgtgcatttgaaaacttgcattataaaatgttacatgctaattttagaaaatatgaataattgtaaaattgattatcaagttagcaaaggttttagaaaatatttatttttcattattatgtgtgtatgtaagtgccatgtatgtaccacagtgtgagtatggagttgaaaggagaactttgtggagtcaattctatctttatgtgggttctgggaattgaactctggtcatcaggcttgtatggtaattaccatacctgttgagctatcttgctggcctcctctgctaagttttagatactgatttttgctatctttcttttatttaatatctgagaattgaccagaatgcagtacatagaatactgagaatatagacctaagaattaagagattctttttactatagattatttaagcacaataaataaattcagttagtgatttaattttataatgaaaatgaattggatattttggaacttgtcttcttaagctgacagatattattaaactttaacaatgaaatgtcctagcatcaaactgccttctgaaaatgtgcctctttacccttaggtttgaggtgggataatggtcttgtttactatacagatttgtcactcgtattggtttaataaaacattaattggccagtggccagggaggaaatacaggcagggctaccagactaggagaattctgggaagaggaaaagcagagatgattcaccagccagatgcagaggaagcaagatgagaatgctgtactaagaaaatgtaccaagccatgtggctaagcaaagataagaattaatggtttctttaacttttaagagtttgttagtaataagcctgagtgataagcccaacagtttataattaatataagtctctgtgtgtttatgtgggcctgaacagctgcaggactgggtgggacagaaaacttgcatcaagtcctcatcagggaagcatctttattcagtggatggtggattacacagagattcacaactggagaaagtgtagagtgtagagtgctttccacatctcatccataaaggttcatgggacactgtagaactgggaggggacatgtaagagccagaggttgagaagtagacagtgtcttctggaaatgacaggactgttatgctcctgaattttgggcagctgtggttgtctacatgggccccactaattggactcagtagatcacactgataaataaataagtaaataaataaataacacatgggagttgggatgaggatatgaggaagagagatcccagaggagaaagctatatgcttcctgagttttagatcctaaggagactattgctgttttcatccccttaaaaatttatataatctcaccaggcatggtggtgtacactgttagctccagcacttggggaggtgggggcaagcagatctatatgagttagagcccagcctggtctacagagtgagttacaagacagccagggactcacagagaaacctttcttgaaaaacaaaaaccaaacaaacaataaaaaaggtactgtaaaatttgtataatctcactattgttataatcaagtcaagaacagtatttaaagacatttgtatctttataggcaaaactctacttctaccaatttctctgaggctatattaatgcacaaattttacatactagactaaatctcctggttttgttataatgacaaaaataagccaagaaaaatatacatacttaaatctagatatataataagttacataccatgtggccaactcaaagaatatttttgaagtaaattcactagcatagaaaaatgtacctaacattttgactaaaaaaaaacgtaaattataggatggatggctcagggcataaaagtacttgctgccaagtccagtgactcacaagatggaaggacaaacctgactctcctaagttatccctggatttccacattcacattgtggcatgcacatgcccacacacaccacacatgcacagaaacacagacaactacacatatacattaaataaataaatgtaataaaatataaaagtaatgaaaacataaggtgataagacagttttataaaggtgaccctacttggaggctagggggtggcattatctataagcagaacgtttctttaggtatatatactacaaaatagtcactgtttatcactagtagaattatggacatttttgtttactctgaatttctgaaagaaatacatattattttacaatacaaatgtgtaaatcggcagcaacagaggtgacaatagataccagtatttcaagatccttaaaattacacaagtcatattttctatggcggcacacccttattcatgcatcataggaaaaacttctaatagcatgttattactggcactccctgactataccttgattgaggttagtataagccatgagtatccaatttaagggtttaaagcactcacaagaaagtcttcaaatctgagaaatgtagctaaacacactcatgttctaagattaatttcaatttttttttaccgattacagtagtaattaaacggataagtactaaatattcccggagattcaaatgctgtaaaaaaagaaaccagggagaaaactctcaatagaaacacgagaaagctagcatctttaattttttctattaaagactcactttttttctccatatggtaagccaaaagtctgtatattcatccaagtacagattattcaatgtcgcaaatgatataagaaacaaagataaattaaatctaccgataattgagaaacatgatttttcatgatagttttaaccacctcttggacagagtcctttggtgaagctcgtatgagaaacataattgaattgtgtgacctcatctgatttcaggtatcctttacaggtgctaatgaacagtgaaatggtcaagaggctgtcggccaaaggaagcagttggagaaaaagcacaacacgggtaattgagaaactagctatttagcttcaaaaacatagagttggctacactgacaattatctattgagtaccttttcaacttaattccatgaggatgtgttgtgaaaccattctatcacattaagagtttagttgagcatggtggatcatagcctggaacctcagcacctgaaaaacagaggcaggagaatcaaggccatcctaggctacatagtgagaatcaaggccaccctaggctacatagtgaattcgaggccaacctgggtgcataagaccctgtctcaaaagaaaaaaaaagctgaaataaaccaacaaaaagaggtttcatatatgcatattctagcttggttaacatgaattgtgccacaatcttagcaattctctataccatagtgcttttcattggcagtaatgataggctgtttattgttggagtgcagacaatcaatggcaggctcttcagctaaatatggccaacaggctgcttatgagtcaggactctggcagacatccctgctttcagaccaatgggaatgttattgactcactcctgtgtctttctgggagagagtataagcattgctggcatccaaatcattttttttattattgttccaaattcatgttctagtaaacagcttttgaaagcattgttatggtgaacattttgtggtttatgctaagcatttggttttcaagaattgttgaaaataaatgtttgtagagtgcaattattttcaagtattacacaataaactctaatatttgaaactaaaacagtatctatgtttgattagtaattaagctctcaaatggttatgaaagtaattttcttttataaggaagtactttaggacaaattgctttctacacttactaatattgagaactttaactatatctacatataattattattgtagctttctatagtggtagtgaatgctatttccatttacggcagtagtttaaaacaaagtacactggaaactatctgatatttgtaaataaaactgtatcttcacatgaatattaattatgttttctacagaaattgtgagagtaatctccatttgtagcagtcattttgagtatataagattcttcattttaatattaactgctacttcttctatgggagtatgtccctgtgtacattttattaacaaaaaggaaaatgaaatagctgtagatatataaattattcatactacttgaataatctagactagtccctaacttttgcttaaaaataaagacataaagtcatttttagtttagttacaggtaatagtcaccaaattctacttaattgaaaaacaaaagtctcctagtttctgttttagtgagaacctgaataaaagtatagacccatttaatctagttttttgagctacaatggcatgatctgatgaattgtaaaatgtattcatactgagcacatgctgtgtatatgacctgatagtattttatatttattgactcatatttataaaaacccataagggacatatctcttaaatttattaaagagatttgggcagttttcctaccactcaaatgattgaactcatatttaaaaccaagtacttaacctctagagtcaatctttgtagttccctgtgctctataacatcactcaagtttctgctacccaaattatttctggcaagtatgattctttttaggcagtccatgatcatcttccaaatttcatttgtgttcctttgtcaagggtaccttacattcatatgggtccagcaaattctatttagtgtactgactttgagttacttcgaatgtatttatcaacttgatttctccctcaattaatctttactggtttattacttttaaccttccctgtttgatgtcccattgacaaggccctctcttaaacacataacacaaattctaagcaacaaattataatacactgcatttgcaagacactgcaatttagaaatctcttctatatgcttcctctcattttaagcttccttgttaatttttggttataaaggttactgaaatgtagtggtagtccaagagtgagaggctaggttgtggtaatattctgaattcaatcatgtccacgtatattcggatgccaatagagcagacccatgggggttttatttctgggaggacttgatctgagcgataaaaactggatcattgacattgatgtgtgttcagcactaaatcttataaatacaggagttaagcaatgtgatctcagttagaagattgctaactgacatggaagttaagatcttctatctaagatggaataaatctgtcaaaaggtgggttaagacaggagatccaggaaatacctttatgtgctaaaatgcagaagtaacaaccttttcttatatatctgtgcttccgtctctgggtaagaaaagagttacttatctttaatttgtttaaacacagtcacattgagtacttcaggttggcaccagacttgttatgaagctgaggctagcctctaacttaccatatgactgcttttgcttgcctagctatgatactgccaatgtatgtcacccaagctctacaaatggaaaggagtacgtagagcaccaggcctgctgatgcattcagtcattctcgttttactccccaattatttggccaagtaattttagacatcttgtattctaacacatatagcttcaagaagtgttatatctaagtctataatatacttttggagactgttattgttgttctgtgccaaacttcccttcaactactggggcataggctcatggaagaagaaaattctgataccaagttaagaggtggcccacccaaacgtgctgcttcttggagatactaaaaaacatagcccaaaacaaatggatgaatgaatatatgtatgacagtcacatacaaaatgaaaattggtatataagaaaaaagataagggagcaaaataagcatatatcaatttagaaacattaaagcaatgatattttagccatgacctatatgaactaaaagtaacaaaagtcattaaacacataatgatgatgatgatgctaaaaattaaggcatgcaataacaattagttaaaaaaagaggccatgaatttaaagaaactgggaagggtatatgggagggtttagagggagaaaatggaggaaaaggaaagaagggagaaatattgtaataatattataatctcataaataaaataaaagactcaaaagagactgaaaaagggatagaaatggaataataaaagcttcacatatcctgacatctaagcagactgcaatatggaaatacgaataaaagcatattcttgtactatactatgtaatagcaagaggttagaaaacaaaatgttcacctagacatttgtgatcatctatattatggtaattcatacagcagagcatcacaaagccctttaaattatgtggaagctctctagctaatggtattatacaaggttgactttgctataccctcagacaaaattttgcaatatgtttagtatagttttaatattgcaaaacctaagctacttatagtgtatgtatgtacagattatttgtgtaaatgcaaagggaaatggttgctaaaagttattacttagggaaatgataacaatgttgattttttaaatgaatttttgtgtgtggggtagggtctcatttatcccaggttggccttgaacttgttttgtagataaggatgaccttgttcttcttgtttctacctgacacatactgggattacaggcatgtgtgcttgactttttttctctatatagcttttcattttgtctgcttccattttatttttctacatctagaaaatgcactgcaaattctaattggtcttaataataaaaacctggagtcagatatcacggtaaatactgaaaggtcagagaagtaaaggagccagccactagagagaattcttacctctgcagaatcctcagaccaaagagtttgacatcctgtttctagcaatcctcacactgaatgaatgagagatcctgtttccactagccctatattcctatctctgcctccctagtgcaaggagtaaagtcatgagatcccaagtgctgagatcaaaggtgtgtgccatcactgcctggcctctatggttagctagtggttagttctaccctctgatctttaggcaagctttatttgttagaacacaaacaaaatatcaccacaagaaaacaaatgtgaagaaaaaataatcaacaacttgggaagagaagtgtataagttacttttctcactgttgtggccaactatctgacaagaagcaagttagcaggatttccttttgcttatacttcaaggggatacagtccatagtggttggaaggtatgttggcaggagcctggggcagctgcttatattgcattgcagtcaggagggaaacagagagagaaagagagagacagacagacagagaaagagagagaggttggtgctctttgttttcttcttattgttcagtctaggactccagcacatgaaatagtgttgcccacattaagagtgggtctttcctctttagttaaactttctggaaatagtatcctagcacatctagatatgtcagaagtgtgtttccatggtgattctaaatccaatgacactgacaatgaagaataatcatcacaagcactaaccataggtaaaattgagatgaatatcaaagaatttatctcaagaaactctattggcctttgaatgtttacagagatattcacctataatgtagtctacttagcatcattaaaatgattatagtaatctcaaatggatttagtgtaggggttgttttcaggacagggttcatgtgtgtgtattatggctatatccaacatctgaacttccttttcttggttaaggaattcacctatgatgtgagttaaagtggaaaatcacctctagtcctagaatatatgtttttgaactaaacctattgaagtctcctacatgcaagttggactcaaagaatgatagggccaggtatatttctttcttaggaaagtgtactgaactataatactaggttgctagcagtgccaattgctaaagagactgcccaatggcataatgtacatctagggctcccatactggtccttatcctctggtgattccttacattcacactgatcttaggtttaagatatttctgtgaggtctgtgaaacacctagtcttttcccccagaaattcactatttgttcctattaactacaatcagcttctgctatttgaaattaagagcttttgctatgtacctacttagtatgtttttatagttaccataatgttggtccaaaaatgtgagcaaggaataacaaattatcccataagtatagaagaagaagaattatataaaccactagtagattaaagttggcatcacatagaaattatctatcataattacatagtcttatttcaagaatatagagatatttttatctaaggaaaacacttatatgtaacatcaatagatgaaataaattagtatctccatagatgccttaggtaaagaaagtttcagacccattttcccaattctaaaattgttaataattaaatacctacttacatgccatatcctgcactagactctaatttatgcagataagacacaatcacttacctcacagagcctatgaaaacaaaaacactaatttacttcttagaggccaatgataacaaagaaaagtgatatattggtggtttttaatatttggtagaggtatacattggaaagttacaatgtggtcagaataatcttcagaaaagtcttctttaaaaactctctctgatgcattgtgtagcataatcatattttaaaatgatatgttttattctttgagaatttcatacagtgtattctcccttgttaattccttcattatctatctttttatccattcccccatcacgtacagtttctgttgcctaactgctcttggaaatggtgtctgtcttgaatctggttgacctatctgggggtcatatcatttaagaaaggcctcttgagtgggtgattttttttaccatgccctgagaggtttgtctcagaaaagagcaaggctaactcattccttggccctaaataggaagagaggaaaatagatgaagatgaaagggcattatatgtgatgtggaaaggcaggatagcagattgaagcatctagaaattgcctttttgatgtgattccctttccatagctaccatcatcatctatgccactatcatctcagacagacattcctgaagtagtagctgcctcactcttcttactgtttgtcattttttcgttctgtaattcattgtaagaattgtctaaaaagtaaaatctcagaacataaatgaaatcatgctgctccacacctaaaaaccttcattggttctctgttactcttcgaataaattaaggtctttgaaggcagctctgctcaccactataccaccaatgcaacatatgagatcttggataactaggcatctatctaccttcctcttcattctcacccgtagaagtttgcttattctccactaagctagcaggctcttcattttgtccatgtacatgtaaaattctttggtactttgggttactatatatcaataaccaaaagattaacaactagaacaaatacgtgaaaaggatgcaaacagataagccatgggagaaagaaaaaaattgttcctgttgatatgtccatttctccaatgtgttagttacaaatgtagagtataaaacagatattttagcctattagtttcacaaatactgactaaaacatttaatacccagaactgttgttctcatattatagttatcaatgtgtgcaaactagtaaacatttctggaaggtaatttaatattagcctttaaatttaattactatgtaccaattcagccagaaaaagccaactcaaggtgtttttattacattgcttacaataataagagattccttaactgtacagtggtaatatatacagtgcaatgacgtggtgatgccatgaaccatttatgcatgtagaggattgtaagaatatgaccttgaacttcatctttgtgacttctaaactttttgatcacatctctcagagtattgtgtgtgctttggaagtaaactgccatagttatggcagaaattgaaaggaacatgtgtaggggtcagttttcttctttcataatgtaagttctgggcatagagttcaggttgtcagcctgggaaactacctaatgaaatgttttactggccaaagtcccaggctttgtaaatactgtaaattctagcattccatacataaaattttcaaaatcttttatctggaaaaataattattatacatgttaaaaactcataaaacaacatggcctataagtgtagagaaaaacagatggtgaaatgaaagatgatataatttgtaagcaaggacactacatacgcttatggacataaacaaacaaatcatgagcttagtgaaaaaggaatggcagatgcaaaagcattccaaatggaaatgatagtgatgaaaatgtatcaatgtacctctgatgaaatttactttttatgagcttgacagtgttagacatggcaaaagaaagcagcagtggacttgaacacactgtaatgactgttgaagacaacattggagtgaaaaataatattcagagaaacctcaagtgacaatattgagcattctaatgtattttcagtaggagtcttagaagactaaatgtagaggaaaaatatttgaagaaataatggccatattttttctaactttgatgaaactataaaagcagatgtatatccaagaaacaacagaaagcaggataaataagttgtcatttgtttcttttagtattccccaaatgctggcatgtcaatgagctttttaaaaattatatttattatatttatttttatgttatatgcgtggatgttttgcaggcatatatgtctgcaccatgtgcattcagtacatgtagataccagaagagggtttaggatagcagaatcccttgggaatggaatttcaggtgattgtgagcttccatgtagttgctgggaactgaatccaagtcctctataagaacaatagataacttaaccactgagacatctctccaaccttgccaactggcttttgttttgagtccttagtttaaatttaaatttctgctgccttaatttgcctttctcattccctaagactgactgtggtctagacaaaatgaatactaatgtccctgttggaaaaggaagagatggaaatcaataaatcaaaatttacagatcttgaaactgctctcaggtaggagaacatgtccatgtcaacatatgttcttgaactttgtacttgacattgggcagttggaagatagggatgactttgtgttgtttggtttcctttatatgcttcctggtactactactttaatcctattgagcttttctgaatcacagcatttatgtttattccccaagtgctgtgttttgtatcttgtacataacacaatcactaaatgtatgtcaactaagagattagactatgatcttcaaattctagcatgtacgagaatcatccagaaagatgataacttacagattgctgagccctatccccagagtccatgattaattaaacctgagatgaagcctgatgacgtccatagagaacaggttcttacctgtctcatctaactatttcttcccccagaaggttaatatctcttcttcctaacatgcctttcatattatttttatatatcttaatggggatcaagaaaaggaaataataatttgcttggaaacatgtagtcctacttatagttatgacttagctttggatgggagtagagtaaataactcataccacttataatttgtaagttatttatatactgtgctcatattaattactggattgtttcgcatggcagaagccaattttgaagacatgccttacaaaggtgtgatgatagaaacagtgaaatagaaatagtttatggcagaactaggttttcaaaactcagacaaattaataagttgatatttttctgaatttataccacaatatgtattcctacataggagaaataaattgcttattaaaataaccatgtaatggatgtgtatttttagcataaagttaaagatgtttttgggtcctgtaccagatcaatgaagtgttggaatttgggtccttgaatttagaacttacttaaaaaagagtgttgtaattattcttccctgttactccgaattgttactgaaacaatctaagtgctgctagaggtcattttgcccatcaattttatcttctgaaggaacaaatctctagaaatggtaaagaattctcacaagggagagtttttggtgtgagaagcaaagaagtagaagtctgtggttggactgtgctttcatatgaaaactgtggcaagataagctcctgggaagctaggaccctctgctttctgtacagctgagtgaacacatgaagttcatatccaggtcacagaaagccctgggataatgctaaccaaaaaagtgaaagacctatattataagaattttgagtccttaaagaaagaaattaaagaagataccagaaaatggaaggatcttccacgttcatggataggtaggatcaacatagtacaaatggcaatcttgccaaaagaaatctacagattcaatgcaatccccatcaaaatcccagaacaattcttcacagaccttgaaagaacaattctcaactttatatggaaaaacaaaagacccaggatagccaaaacaaccctgtataataaaggaacttctgggaatatcaccatccctgacttcaagctctactatagagctatagtgttttgtgccagcttggtattggcaaaaaaattagacagataggccaatgtaattgaggtgaaaatcctgatattaacccacacacctacgaacacctgagttttgacaaagaagctaaagttatacaatggaaaaaagtatcttcaataaatggtgctggcataactgaatgctggcatgtagaagactgcagatagattcatgcctatcaccaagcacaaaacttaagttcaaatggatcaaagacctcaacataaacccagccacaccgaatctattagaagacaaagtgggaaatacccttgaattacttggtacaggagactgcttcttgaaaattatacgagtagcacaggcactgagatggacaattaataaatgggacctcctgacactgagaaactgctgtaaggcaaaggacacagtcagcaagacaaaatggcagcccccagaataggaaaagatattcaccaaccccacatccaatagagggctgatctccaaattgacaaagaactcaagaagctggtctccaaaacaccaaataatccaattaaaaagtgaagtacagaactaaatagacaattctcaatagaggaatctaaaatggctgaaaggcacataagaaagtgttcaacatccttagtcattagggtaatgcaaatcaaaacaactctgagataccatcttacacttgtcagaatgactaaaatccgaaacaccaatgacagtttgtgctagagaggatgtggagaaaggggaacactcctccactgctggtgggagtgccaactggtacagccatgttggaaatcagtatggtgattcctcatgaaattgggaatcagtctaccacaagatccagcaattatactcttaggcatatacccaaaagaagcacactcatacaacaaggacatctgttcaaaaatgttcatagcagcacgatttataataggcagaacctggaagcaacctaggtgccccacaactgaagaatgggttgagaaaatctggtacatttacagaatggagtactactcagtggaaaaaaagtaatggaatcttgaaattcacaggcaaatggatggaactagaagaaaccattctcagcgaggtaacccagtcacaaaaagacaaacagggtatgtactcactcatatatggattttagacacagaacaaaggattaccagcccacaatccactccacaagagaagctaggaaataaggaggactctaagagagacatacagggtcctctggagaaggggaaagggacaagatctcctgagcaaattgggagcatgaggggagggaagagggagctaggagagtgaaaatggaagaagagaaggggtagagaagacatgagggagcaggaagtttgagttggggggaagaatagaggagagcaagataagaggtaccataatacagggagccattataggttcaaagagaaatcaggcgctagggagatgtctgtagatctaaaacaatgacaccaactaacaatctaagcaacagaggagaggctaccttaaatgcaatcccctgataatgccctgatattgagagtgatgactgacttatatgctatcctatagccttcacccagcagctggtggaagtggaagcagacacccatagctaaacactgaactgaactggaatccagtttcagagaaagaggagtggtgagcaaaggggtcaatatcaggctgatgaaacccacagaaacagctgacctggacaagggggaactcttggttcccagactgatagctgtgaaaccagcatgagacttattgagaccccatgaatgtgggtgtcagtgaggagacctcagaaatctttggagccttttgtagtagttcagtacttatccctagcatagttgtggactttgggagcccattccacatagagggatactccctgagcccagacacatggggggtgggcctaggccacatcccaaatgatatgacagacactgaaaaccccctatggaaggccttaccctccctggggagcagaaagggtatgggataggtagggtgtttgttgtgggaggggcagggaaggaggggaggcagagggaactgggattgacatgtaaaacaatcttgtttgtaatttaaataaaaaatggagacaaaataaaacaaaacaaaacaaaagttagacaaacaggaagagcattagacaaagtagcagaaatgtttagtcagtgtgaaaatctaacatgattaatatcatttcacccatttactttaaagccaactttgctgatttaaagcacttttagattgtctacagtatgaatagaacatgttcaaatgcaaaaaaaaagcaatttaaacatgttcttttttttaagggcacattttctttttgatgattgccctaatatttggtagccccattctaaattttgccctcaaggtgccaatggtaccacccctctctggagtctccttattccagactccacccctaaaaagctccccattggtggctccacctacagagggcattaaaagcccccagctctggattcacctagtagttcctggttttgtgttctcctgggaccacccaggaatactttgctcagagtaaacatggatttattaattcagtctgatcggcttattgtatcagttgtggttggtttctagtatcctttccaccaactgggatttttaaacataacacctatcactattaaagcataaggcctaagagtgaaagaatggagtgggtatgcagagaaaagaaagtaaaaggtccctcggagttggaaaaagagagtctattcttacttctcatccaggcccaagcctaggatggaagttgagtaaacagagttatctttgttcatattcagtttagcaaagtgctttgttggttttttgagacaggtcctcacatgtctatggctggcttagaaactgctttgtagctgaagatgaccttaaacgcttgatctcactgtctctatgtcctaagtgttaagattacaagcttgcatcacttatgtcctgcttaactcagccctattcaacctaagatatatagacatgtgacacatgaggccatgtttatagctagaacaaggcaggagtctcgttggggctatacacactcattggcagtctcttcaagaagcagacagcattggggaatccaaaaattcaacaatatgggaatcttatatgttctattatgtgttcatttatgtgggaataaagtttatctcatgctatacctacttggttatagatatctcaatagataaattttgccattaaatgaaattgaatctttttaattgaatgattgtttaacagctattttatttctgttatgaaatatgagctttgcattaatgtaataaatacgatgatgatgatgatttgcccagattaattttttctagtacaattttcctattgtcctttggaggacaaatctcttcttagtttttgaaatttattttctacatagttctttttaaaatatctcctctaaccttggaacactgagccctaaatgttgtgcattcatcaaatcccttccctcagggcttggagaaaacatggaagagaggtggaaagagnnnnnnnnnnnnnnnnnnnnnncagaggggcatggaggacaccaaggaaactaggccttctaggtacaacagtaccaatgcacatatgaactcacagagagcagcatacacagggccagcacaagtctgtaccagttggagtcctagagctgaaagaaatgaacacacaacctatccctaacccagaagcaatctctaaccaacaaccacttgcaaataaaaattcagttttctccaaagaagcctcaccagggaaacaaatcacttaaggataggccccatgcccagaaatagctggccaactgaaaacaaacttaatagcatctttggaggttccttgtcatataatatcatatcagggctttcttttcttttctttcttttaattttatcttttaaatttttattttaattttcctctttcttggacttcttcttgggatcttttccttctgtttgtttgctttgttatattccaatgtgttagatttttgttttatcctattttatttcattattatcccttagaagcctatgtgttttctaatgagaaacaaaaatgggtcctcagcataccactctgaatgcgccagatctcatatgatcttggaagctaagaaggaacaggcctgattagtgcttggatgggagaaacagaaatggaatgaatctgaatgtgaggggaagtgggaaggacctagtagagggaggaaaaactgcaatcaagatatattacatgaaaaaaatctattttcaataaaagaaaaaattccctctactttgctttaagttctccatccatgaaatattttggtattataaagagtcaatttattattattgccaggttatcaataaaaccactttcatgagcaagtctaaatgatcctgtattattgtaaaagagcaccatcagagtaaattataattgcatttcttttatgctgaaataaaaggacatttcctcagatctttactcacaccgaactattaaacgtgtattctaataagctacattcaacattttaaacacaccatctttattggtttctttctatactccatttcatttactgatctgcatttctgtttatgccagcatcctctaataatgctatgacttgctcagcaaaacgctgccacttctggcgactgaccaagcttgcacaatgtgctttcacagaaaagcttcctcatagcagactactatgtgaactattttggtagggattttataatgctgctttgtaattaaatgagagaaaattaaggatctgatttcaaattaacttatacaaagtcattatctatcattctgaccagaaaggcaataggctctgtatgccaattgaataatatgcagcaagtaggacagacatgtcacttattttaagtcttaatattatattcatatttgaacacagtctaattatatttaataaaatgtagtgatacataaaaagcacaaatcatgcatggagtttcattccttaaactaagatagcatctacaggcttctgtgcaatttactaaataaaattctactgtaatttaacttaaagcatttcaaatgagctcatcatcatgtgtctttgagagaaatatatttttgaaggtttaaaaatgtttagtgatgaatttggagttttataatcatgaaaattcaagcatgcttatgttttgtaattctttctaataaaaaactgagaagtattttaattaatctcttctgagtataaatatagaaaagaaaatctttcacattccaaaaaaatcactatgctatgaagagactctcaaagcatattctcccttgtaaggtttatgaaacaaatagtatcattatttgtatagcatttactaagcacaaattatcagtatttgattttgttgattttgaaaatctatgaatatatataattaatattatagagttcttatttttcactgtcaatataagtgggtcttgcatcaatgctaggtcataaatctgaagtgttatttttccatttgttactttgtgtgttcccgtgcacatacaaagacagaaaagcttcttgattgcctaaagccattgctgtaagaagcaagaaatcataaattgattgctggttattcttacctcccatgaacttacttctaacaagagtgaaatcaataagcaaactgactccaccactctaccagcttgcctttctaatcaggttgttgcttcatttaattaaaaaattatgtttttttattatatgtatatgggtgtttggctgtgagtactccaggcatgcagtgcctgtggaggccagacgaggcctcaaggtcctcctggatctggagctaaagtgagttgagagctgtcatgtggatgttgggaactgaaccttgtcctctttaataacagagcagccagtgctgagccatttcttcagcccctgttgctctgtttctactgagatgaatattctaggaaccagtgtggtaccagttggagcatatccacttctgttttggaagaagttctagtgagactattttaaacatacataaggttagaatattaaaatttaaacatattgttttgttctgaaaagacaactggcttgtcagcatataacacaaagtcatctgtaatgcatttcttaaatacacaaattcagaacccaggtgactctagttccttaaaaacaaacagaaacaattaatttgtgcttggggcatactttcgtggtagagtacttgactaatgtgaacaaggctttaggtttaatattctgcgttaagaaacaagcgaaagtaccctttttgttagaaaatcagaggaaatacaattaagtgattatagaacccaccaaagtcaacattttaattacataatcataggattaactatgcttccacctgctaggtgcatttgaaagtttttctaagcccctatttctatattatgcaatatgactaaatcatttggtaaaatttctgtctctacggattttatttgttccctcaaaagagatgtaaaagtcttggaaaaaaatcctactaatttctatattttccttcagtcaagtcactttgttgagttatgtttatgagtagagtaaaacaaggaaatatgttttgtatgccctcattttagcacatcactgacttttaaaatccaactttcatttacaaaaaacaacaacaacaaaaatcatatattgggtttgatacaattccaggggaaatgttggctttctacgtatttaaaaatggttatgttatttagaaattcacatcattttggttgttctataaatgctattatgaccccacaactaatttaaagttatggtggaaaagtctattatgatgaatccaccctgcatttcttgacttgataaatttccctaaattgtgttttcttttgtttgtttgttttccttcccttcagaaaacaggcttctacttagttttctgctactttaaatctaaacttcccttccatgtttctgtggtccaaaaccagacttccttttctctctccagcattgtgtgcaacttccttttaaatatagtttctgtgccagattgcaaatacagttttgaaggtaaaaaaaggtaaaagcttcgaagtctggaaaaacaatatcttggaagatgaatctgaaaaaaaattaaatgaatagtttccaatctcagacactatacaaccctttggttttccatagctgaattaatcaataaatatgaatactttggacattcatctcattttagcacattgttgcctttaactttttaagtgtgtgtgtgtgtgtgtgtgtgtgtgtgtgtgtgtgtgtatgtgtgtgtatgtgtgtgtgtatgtgtgtatgtgtgtgtatagagagagagagagagagagagcccatgtgtgaaggttagaggagacctttgtgggagctgattctgtctttttaccatgtggatcctgaggatcaaagacttagattgtcagacttgatgataagggcctttacctgctaagctgtcttgtccgtcctacattgtttattttaaaaatctaatttcatctacccattaaacttatggattttctccatttcttcccactttttgctgacatgcatgacattttctttcattagaactgtgcattcactacttatcttgatttcatgacaaaagaaacataaggcataaaagagtgtattctggctcagaatttgaggggatgcagtctatcttgacaagaaagacatgcagatgcagttatgaaaaagatagtcacattgcatttgtagttaggaagcatccaaagatgaatgctagtgctcagccctcttacttttttttacagtttgaggagcaaagcccatggaatggtgtgtcctacatttaggatgggttaacccaactcaatgagtccaacctataaaatccctcacatacatatccagatgcttgtctccttggaatttctagatcctactgagtagacaatataaataatcacagcctttgtctccattccagaatttctattatttttattggtatggctcccaataatctcctaccattcctataccacaaaatatgttgttttcctcgtggcctgaatatcatacatgatgcatactgttcattaaaattagtgcattattttgcttatacaaatcttcatactggaaagacacttgcaaaaccaatttactcaattccgataaacccccaggagattattttatttctgctactagaatgaactcttctgtgtttgttgctgcccactgggctactcctagctcccagtctgaattcctttacatatgtagcagtggttctcacccttcctaatgaggcattcctttaatggagctccccttcttgtggtgactcctccaaccataaaattattttcattgctacttcaaaactgtaatttttctactgttatgaatcataatgtaaatgtcttcattttctggtggttttggcgacccctgtgaaaaggttgtttgatcctaaacaggttgcaattcaatggttgataaccgctgatatatagtgtgtgtctcaatcatgcattttttccttctcagcaagtgtttaatttttctatgttactgatactatcttacaagcaatgtaaatttgtgcctcacaaactagttgagtaacttgataaataaatgatgaaacaatgcaataggtgttattttgttgggaaaatgatgaatgatgagtgaggagtgaagagaagataaaagaatgatgacagacatgaaagaacaaaaaggtaaagggaccaaaggagctggaagatcacagattatataagatagaagtaacaggacagaggaactgcaaagaaaaaaagactagaagccagggagtagggcatctcatttgaaaattttaaaagtgatgcaattacggatggtgggtaataaacattaagatgtggccatgcatgtaaactgctaaatgtcaaccttaaattatccttcactttctatgtgctaatttccatttataataaacattactgagggatagggatgagacaaatagaattctagcatactcccaacaaacttaattccttcactttgagtgtgggtaaaatctatgaatacggggccacctggcaatgattatataacattttatagcaaacagagtttgtagtaactgattaattgaatgattcactaagggaaggttaggttcttttccccaaaagaaatttgatgcatgacagagattcaaaaaaagaaaaattctccattgttggatttaatgagggaggtgcccttgtagcaggaaatatgcattcatcgtggacaaggaaattgggacatcggtttcctagtcataaggagctgaatcatctcacaactatatgagcttggaagtagattctaacaccagataacagcccagctggacacacacattcattttaacctggggagatcctatgcagcagtaacagccaatgttgtagccagacttaaaacatacacaactgggagctgatgggtgttattttaagcccataaatgtgcaatgtgttagtgctttagtttgaatccagaatgcctataaaggcccatgtgtcaaatactttgtttttagcttgtggtactattagaaattggtgggatatttaagagatagggccaattaaaagaaggttaagccatgtaggtgtgtgcaattgaagggaatattgggatcttgggcctttcttgtttctcaacgactgtgaagcaaacagatttcctcttccatgggctcttggtatgatgtactgtgttgtcagagaccccaaagtgtagggcatcagaaccatgaatttaatcctttaaaatagtgagtccaaataagcccatcttctttgaagttgattactttggatatttttgccgtagtgatgaaaaactgaataaaatatttagaaaactaatatagggtataagttgaatacactaaaatgtactcatttaaaatgtataatctggtgagttgtgacacgcatgtcccactacacttgagatatagaatatttaatgtcacatcctgcatggggggcggcttgtagcagtcccacactacagaggctatttattccagactgatgtctctggggctgagacagtagccagccaaatggccccgggtccaaccctgagtcaggggtgggtggatggggtgttgctggaccgggaaactcctaactacccaatggcgataaagaccagacacaggcatcttgtcatttcaggagagctctcagtccttgctggaaaattggagtttcaggttcattcaagcatcatcctaaacagatttccaacagtgggggtgcccgcagaaggcatctactatcacctacatagctgacatcaagtaatcctttcagcattagcggcacacctgaacagtccctaggcatgtagacaaactctcaggacaggtacaggcagacccagggcctatgtctgttgcaaactaggagacattctctactgaggccaagccatcctgctgctgcaatctagccagcatctaaaagacattgggagattcaggctcctggaaaatggaggggaggtttggactccaatactttattattgataatttttgggccctaacacgcgcaaattaatttgtactctttttactgtggctatccaccaaatatcaagttttcttactacaggaatacatgaccaacaaaggcacagcaatctgggggcccaggggagaaaacactttccagcaatcagaatgcagagacaggaagatcatgattttaatgccagattgggatacagagaaaaagaaggacaaaaataagagagaggaggaagggacaggagccctaaatcataaaatggagagtttctcactgattgtaaatattgccctggactgttgtacatcttgtaatttgactagtatattttcttgtcattcttccaaactgaacatatgaatcaagataaaaataatgtatggaaatacttttttaaagggttttctttgttctttcccatgtcaatattttttttctttgtgaggaaagatacaatagttggggtctgttgacatgttttaagtgtcaggatgaaggtcacatactctaggggtgacaaatgaagacaataagagagactgcttctgtggtaacatggagtcttccctaccagtctccaaggaacaaatagattctgattacatgaaagaaaggaaaaccaaagcaaagtaaaacaaaacagagcaaacaaatctcatagaagccatttgtcatgttttcagcactaaatgtagatcataatttttagtttgtattttcctaatgtaacaccttattataaagatcttatatattatcatctgactcttcctgatgctacttgtcaatctttccacactgatttttctgggttgctctttggattgctgttatttcctcatgagtctatcttgtctccttaccctgggttatctccaggttagtcaactgaaacctatttcagagtaattacatgacaattaacctacagaagactctaaaatgcttcacaactaatgtaaagtcacaacttggttccctcagcatgttttctgtgtctgcttttctttacattaactttaggttatcctttcaagctccatttttaggtgaaagtaaaagaactactagtacatagattatatgatggacaacactctgtgaaatccatcattcaaggaatacaggatattggatagtgtgacctatgatttataggtgggaagacaccacttatcatctctaggaagatatgttatacctattggctgttctcatgctgtgcagtatattgttttcgaggtagggtaaatctcttatcttgttagagttgtttatttcctttgtacatccatgaaagcaggaaagcaataaagatgctcataaggtacctcatgggctactaatttttgttctcaatcggggagactgagagtggaaatgtggatttgtgcacagcattgtcttgttgtttgaagaatattcctcgagaaaagtagagacaaaggaagaactgcaaacagcggaaaagtcacatctgctcatggctgtatagcttctgagttgttcgttactgccaggagaaaaccaactgaagatgtgtatatgcattaaatcaaataagaaaatgtagtgatacttactgaaaagtctgatcaagaatattgaatatgcttttttaaatctagccacatttccatcattttagtacattttttgtgcatagtagaccttatatgtttattgcaagtactacttcttacataagttgattaaaatcatgtagtcttcataatagagtatgttaaaaatccaattcataatcaaatatggtcacttgactaatctttgtattttgttatcagtctttcatgcttacataacttaattctcccaacccaaagccttaagtcaaagttttaaaaatctggtagaaaactagtttatttgaagaccactagtaatcatttatacttctaagagaatgcattgtcctggacaaatgaacagcagaaaccttttgtcttcctttgagctattttaatcattagcttcattcttattaatgaagttgttttattcttaaaaaaactgccagcaccaagtcaaactgattaattagcctggtttatagtctgtacactttccatggcccattgctttgagatttggtggcaaatacattctaagtatgttgagatgctctgattcccctgtatctttttttgcccatgttgatcaataaggaggaagttgtagtgagtagaaagagaaagaggaatgatagccatttgatttgacatcctattctggtttctagcatcagaagtggtttcatattgattattaccaggatgttccttgagcaaagtagagatgaaagaactgagagcagcaggaaactaggtcactcacttgtaaatggtagataaaaacaaaggcatagttcaggtactgcctagggactagaagtaggaagttagctaggagtgatctgaagatgacgaaatgaagtggatgggatcacttcatttgagcaggtgaaagttaaggaacagatttacaagtttcaatttattctacacagagataaaggtgagaagtcatacagctgtaaattttctttttttaacttaaaattgttttaaaatcttataaactttattgtaaaaaaactcatcaacctattaatcaagcaatgaatcaatcaatcaatcacacaccaaaactaaccagacccaaagtctatacaactcactgactttctatacagttaggacaggcattgagaatggaagatgaggagcttcatattgaattttaccctcttagcattgaatatatttagctaccatcaacatcccaaactccattgcagaattagaactagaaaaacaattagcttcatattgtcttccataatttgtatcagttacttgaatttagccaattttattcttttctttgtgtcatactgccccttacacacatagttgtttatatgtattactcctagattccacaaatgagagaaaatattttttctcttgagtgactgacctcacttaatattcattcctgtctatccattttcctgaaacattctaaacttcatttttctttagaggtaggtattattcacatatgtagataccaaattattcacacatctattgattataatctagtttgattccaattctttgatatagtgaataagactgcaataaaaatggggtacaaatatctccatggtagtgtatagatttctctgggtatatgtctaggaatgaaatggctgtgtcatatggtggttctattcagttgtaaattttcagagtcagttttaagggtgaagagcccataaatacaggagacatttttaggctctaataggcgaataatgcctttaaatttagttagagagatcttaagtggtgcagtatactattttttggtagtgtaaatgctgcatgcattcaaccattaaacttgaggacgatttttgtctttgagataggatgtcatcatgcatcacagtcattatatattactatatactgaaatgtttcagtgtcacacaaagaaaaaacaaagattgaattcatttctatgagcatcctcacctctcctgtcatacctctgaataaagaaacataaataacaacaataaaaacaaaattatcgtctacatatttgtatataatgccatacattttcaaagctcttgtttctctcataaaataccctactggcaggatgatacttattattttacttatgagaaaaacagataagaatatgaattgtaatttatcaaatttcacaaaacagcttaatctttggctttgtacaagttctgagacataaggagtagaaaaggcaatactccagtggttactatcctctaaagcaatccagctacccccatggtgtcaagaatctataagcggggtagaggcacacaagaacttagaacaaaacacagaaggtaattattttgttttaaatttttgcttgtattaaatctgataaggcaagttgagtgaattccattttgtataaagcagtatgaataagaatgtattagtttagtatgtgacacacattgagaggtagattcaggaggattgctacaagattgaggctagtctggtctacctagtgagtttcagactagtcagaattccaaccaggccctatcccaagaaatgaaaagagaaggagattagactcatgtagtttataattgaaatagggagatatgtaataaatctaacccactcagttaacaaattatttttagacatggcaaacacatctgagtacaaataggaggaataaacccattataaatgagagtgaaattcagtttttaggagatcatcagctatcatattagctaacaatgaaaacagagtgaaagcatttaatttaggttgtcagattaagataaagggagatataaagtaatagaatggatttcttcatgaattaaagaataaaaatctaatcttcagttttaagtattgtatctcaaaaattaaactctgcccataaagtaatcaatatatgacttaccttcattaaagagctatatttataaatgttccataatattaaacagtttattattcaacataaatgtcacaaaatgaaacacttggaatgtgagctaagttcatttacattccaagtgcgacattgccagtgttaaaattgcaggatcaagttaaaattttgttaccagtattaaaattagtcatagcccatttaattatttaaaagaattataatatcatcaatggtaattacataggtaagaaaatcaattatataagaccaatgtaaagttttaaaatacaaagagcagttggtatatagccagtataaatgaacctggtacttagccaagaaaaaaagtaccaaggtagttctgccaagatttatgtaaaataaattgcataatttttaatggatctgtggtaatgttcatataacacagagactttagcattttggagtaaaggacaaaaatatttaaaaggacagaacatttatatgggtgtcactaatcaggctgaaaatgcatttggagggatcctttagatcagtagaccctattcctacaccctacatcaagcatagattttcatgtatgttattatacttcccatgtgagtgaatatattatagggaagatataataattttatgtatgagaataattgtctcttaattggatgggaactggaatgtaatcctttatgctaatcctttgtttactgagatggagccagagatcttgtgtgactcccccaaggctataaggcagagcagggattagggtggacatttttctcattcttggtttaaaaacccatttttcagtcacgtactaactttgtgtttcagacgaaggtgtgactttacgaaacactcaaaatatttttatatcatagtaagaataatgatgaagatgttcataatatggataaaacatggttacaaaaaatcaagccttcataaagtcattaggtcaatttacctttatgtccccaaaccaagcaaagtgaacttgtattgtgccagatgacctcatgggaagcagaacataggttcaatgaaactctttcaattccagtcaatgaaattctttgccagctctaaaaatccaattacttcacccattttgaagatcaatatttgaatcaatttatctctatccaaatccatggtaaagaagattgaaacaattggaacaactgttctatgacacattttggttgaacacacagattcactaataaaactttaatctcctcccatgtctaggagcccttgacattcccctgaaatgtgtatatctctcaaatgcgatacatgttttcatactaaaaaaatagttccctctatttcctgagaatcacatttccatttcttagaatgaaaacattttcttttcatatcttccaatacagttctttataaatccattaaaatcttatactagattgatagttatccttcttgccctcctctcaacacaaaatgttttttaaaaccacaacagcaactcagccaactttgttaagatgcaggccctttttagacagctgaacactctagtaaattaagtgactcagacagcctgccacagtagaggactgcatattaagaccattttaggatagtcaaaataatgttaatttagtaaatgtcaaatgtttttctgtgtttgcaaccatgagaaaataatcaaagggatgtactatgcctagaggtctaaaagataacaacacagatgttgtggattgagctatgctccacaataattcttgcattgagaattaaagcaccccagaatgtcaccttatttggaagtaaggtcactgaaactggagtttgttaagatgagatcattggaatgggtgccaatacagtactactggcatatttataaaaacatagaaatgaacatttggacacagacacagacatacacagaggaaagaaaaggaagagatcgaaggacctgacaatcatttacaagacaagaagaaacagctgcaaagggcctctagcccaaacagctctcaggaggaaactaccccactgacatactggttttgagtttttgatttacagaatcctgaaacattaagcttctgggtatttttaaaaaatagtttcttttcattttataggtgtgagtattattgcctgcatgtgaatatgtgcactatgtgcatgcagtgtccttggaagccagaaagggctatcagatatgctggagctggagttacagaaggttgtgagccaccatgtgggtgctggaaactgaactcatgtccactcactgcaatagcaggcagtgctcttaatgactgagtcatctttccatcaccaaactgttacatatattctgtttggggaattctgttgcaaccttgaaaaactaatatcacttatctgaagttccagatgaagaaatattttaagacatcactttgtattgatcaatcaaaagtcataaaataagatctaatatagaggtggtacctgataacctctttaatatatatgaaggtttttactatatgtgatgggctttttaaattatctgaaatctccaaggcaactggaaaattcagttaaacaggaatttaatttttaaattaatttgattttatagttcatcataaacacacacacacacacacacacacacacacacacacacacacacactagagaatgagaaataaaaacatatggtatatacttccnnnnnnnnnnnnnnnnnnnnnnnnnnnnnnnnnnnnnnnnacacacacacacacacacacacacacacacacacacacacacactagagaatgagtagtaaaaacatatggtatatacttccctgaagtttacagttatgtaggataaattgttcatgtctgtattgctgtatgttgtgtgtctctgtttctgtttgtgtctatgagtgtctgactatgtgtttgtccatgtctatctgtatttgtgtgtgtgtgtgtgtgcttgtttgcatgtgttttaattgtgtgtataaatgtgtatgagtgtctgtatatatgtgtgcctgtctgtatttatatctctatgtatgtgttttataactgagtcaagcagacctctaggaatacagttgaagagagggaggagggagcatatgagcaagggaggtcaagatcatgatggagaaatctacagacagctgaaccaagctcgtggaatctcatgaactctggaccgacaactgtggagaccccatgtgaccaaactaggcctactgtatgtgggagacagttgtgtagtttggtatatctggtggtccccaggcagtaggaacaggatctatccctggtgcatgagctagcttgttggagcccattccctatggcaggatgccatgctctgtcttaatgtgtgtgtggggggggagagggtcttgcttctgcctcaacttaatatgccagactttgttgattccctgtgggaggccttacactatgagaggagtgggtggagatgggctggaagggagtggtgggagggagaactgtggttggaatgtaaaatgaaattaaaaacaaaataaaaaagttaaaaaagtaaatgtcaaaaaaacccaaatctatttgttctgctaatcttccttttaagagagaaagaccaaaggaaaacatatatacttgcatagtttatacagtattacatatatatatgtatttccttcatatatatgtatctatatgaaattttcttcatccatgttgccatgtttgctggtgccattatgtatttcttgtttaggggatacaagcagggacaagcagaaagttgttctcttcgtcttcctccccctctcttctctggagccaccatgtgagcccaaaaagagaggacacatgccaccggcgtcctcaatcagattagtctttataaatatatagattaataattatggttgatacttaagacagagatagcagataagaaatcctagtcattggccagcagcattgtacctaatataagtctctgcatgttacttgggaccttaatgtggtggcgggccctctggcttttactttctgatccttcttctccagtgttgcctgtaccttagttgtagtgattgcattttgaatgtatcagttaaggctttgcacatgttagctactttgaactgccaacttgatacacctgggagatgtcttttttgcttcctaatttatgcagaagtgccaagcctactgttagcaatggtattcctagctagattgtcaagcctactgtgagccatgctattcctagccagatggtgtaagaaaggtcgttgggcaagccaaggggagcaaaccactaagcagtgttcctctatcctctctgtttcagtttctgccttcagactcttgtctggagttcctgccctgacttcctccagtgatagatcataatctatcaactgaaataaagcctttcctccccaagttgcttttagtcacagtattttatcaaagcagactaacgtggtactctgtagtcagttattctcttcattttgatcagtgtgtatctctatagtaggcttctttgctaccaaaaagtttcttttatgagaaaacaagatgggccagtccttcaggattcctgcttcatgaaagagtctgccggactttctgtaggacacagaagaaagagactgacaaattttgccaaaatagtcaagacagtccttcaaacttcctttttcactgagaaatctgtcagacactctaggcctatatgctgaagatggatgtccctacacagagaaaccctgtctcgaaaaaacaaaataaaaaggaagatggatgccccagtgttacagatgaactttgaatgactgtccaggcagccagatagctgccatttctagagttttggaagttgtttatcatgcacttcctgtttactcaggtaatattatatccttctggggtctttgatagagttaaggactagatatttataattatagttttctttaattatgataaaagataaattatatatgaaactttaaactcacaaagatagatgatagaatgttttcttcaatttttgtcaaatagagactaaatattataactgtaattcttgcttgatacctgttttgttatatgcaattttgcaatgttaaagttaaaaccttcctattcaatcacatagaaaagaggagatgatgtgggatgcccctctgtatgctgtgaatgtgtttttaaaaaagattttattatttattttgtatacagtcttctgtctgcatgccaacagaggacaccagatttcattcaaggtgggtgtgagcaccatgtggttgcctggaattgaactcaggacctctgaaagaacagtcagtgctcttaactgctggccatctctccagccccctgtgaatgtgttttattaacattgattaataaaaaagtgaatttggccaatagccaggcacaatagagccaggtgggaaatccaaacagagaaatggagagaaagaaggtggagtcagagagacaccatatagcttccagaagaataagatgccagagcattactggtaagccatggccatgtggtgatatacagattagaagaaattggttaatttaattgtgagaactagttagtaatatgcttgagccattggccaaacaattataattaatattaagcttcagcatgattatttttataagcagctgtgggactagcctggatgagtaaaaagcttccagctacaactgtttttgtggtattttggcaaagaatgtggctgctttttgcccttgtgcaaaaagtatacttaaatctaaagtgaaaatagttggtttaattacattggcagaagaaatctcaaaacagcctagtattaactctgttgtctggttgttactgctcagtcttatgcaggctatactaaaaaggagcaagctgagcaagggaaaatacaaaatgtatagttcaaggagaaaagagtcaccagaaagtgtaaagaagataaataatgtgttaaaggagataaacagattaaagaaaaggctaatattaaatgaaataaagtgaatggtgacctcagggtaagattccacccagttgagatcgcaaattgtgaaaaggaattaaagaaaagcttagaatctagtgagggggcacacacctttaaccacagcaatcaggagggagaggcagacagatctttgagtttaaggcaagcctggtctacaaagcaagttccagaacaaccaggcttaggcagtgaaggaaactagaaaaaacagaaagctggcgaagatgtaattaaagtaggcagccatgttgttccattcctattaagcagcagaacttgttagctttggccacatggttctggatttagggatagaagaaaggggttatgaaatctccctctacaactaaggaaagccactgaggccaggcatgtgtcaagggtattcctgtatggagacttagagaggctatttcataaagctgtgaaggtgaaacctgagtagccttggagaccccatgatgttgcagataggagagctgtgggatacaggctgaggaaagctgctaacagggagtggaattagcccaagagaaataagtgtgttgcaatcaacaaagcagaatggagttagggatatgaagaatgttttgacttcagacacagagatgtggagttggaatttgtgcagctgtattttggtcttgctttggttccggagttcctcactatcctgtactccattttggaatgataatgtatatcctgcaccattgtaggttggaagcatgtgatctactttttgatttttgattttataggggattacagttaagagattgccatgagtctgagaagagactttggacttttatagactatgggggcttttgaagttagactaaatgtattttgcattatgatatagttgcaagcctatggaggtgagggattggaatgtggcagtttgaaaataaatgcctcccattggcttatagggtatcataaccattattcaagatttttgtgtggaacatgtgttgattacatgttgaacatgcacattgcttcttcatttataaataaataaaaggtattttccaaggttagtactgggtgtttaacagggttgttttagaaatatgatcagtagccatgagttggtggcccggctaatcccagcacttgggaggcagaagcaggtggatctctgtgagttcgaggccagcctggtctccagagcgagtgccaggataggctccaaagctacacagagaaaccctgccccccccaaagaaaacaaaaaacaaaaaaaaaaaacaaaaaataaacaaaagaaatatgatctgtgcaaatctagagagtcaccctaataaacacgatttcaattctttttatttacaattaaaactacagttcttgccattggtagaatgtacatgtggatatgatcaaagcgttgtgctcctacttcattggaatccctactaaatagaaaagaggctcaaggagttagcaatgtacaagtgggatgaaattaacctgtaatgactactggtactgaagtatccaagtgtctgcttgaggactaagtatttactttagaagagaataactctctggctcactctggctggtattggcactttgtcatatggacaatgactcactgaggcctttgtcattctcccattcttaaacattcctgtctgatgaagccccgctctttcaaggtcttaaatcattgtgggatatggtaatataaaatgttacttttgtttttgcctaagagtcattctgtttctttaatgtggctttgtctgccatggccaggcctgataagacttgattttacacttgaattcttttgtttgtttgtttgttttttggcttttcgagactgggtttctctgtggctttggaggctgtcctggaactagctcttgtaaaccaggctgtatacttgaattcttatgtatgtcttccacagtatgaataagctgagtattttttgtattttatgtaaaataagagtattttcagacattattttatcttttatagtttttttttcctttctgtgttcttaagaaatctttgaggctattttaaaaatatgctatgtcactttaatcgaaagttgaaggccttaattcttggagttttgccatatttttcctaatgagcattttttatttatgtaagggagccaaaaacagaggctttcatacggaagctgattttaagtttagactcagatatcttgataagaaatgaaaataattagttataagatgtttaaaatcacttttttgtcacatacatatgaataatatatttcagtagctacataactacatttgtatattgaaatacaatattgcaaacatcctttgttttgctttgcaaaataaatggaatcctggaaagttcataataaaatgttgtgcaaagatatggagtcagcaatcctgaattgttaacagttttcctattttagttggcaatgtggctctgacaaacacttgaacaagtgccctggtccttataccttgaaaatacacgtcatgctggggcatgagttagagtagggcagaatccttacatggggctgggatctagaatctgtctacatgacccaggtgctaggaaaaccaggaattttttataatggggacgctatttgacctattgaacttctatggaacttgtgagagggatggcataaatgtcggtaagagaatattctatgaaaataatgaattgaaaccttttataaaggaagacctaaagtagtaattttcctcttgacattgcaacatgtgtcaaaagtgctaaaccctctagaaactctatccttatctggaatttcaatgttcctttgaaaacctatgcagatttttagtctctttactcattcctgaaagctattgctgctgtgcagataaccctcaaatctatcctgaccacagcttttatcttgaactacagaatgccatctcctagtgactgctcatatctctaccgccctccactgggcttcaagaagtcatcactggcatcatactctaaaccacagataatttcttctttcagtctctcaaatatgtaacaccagagttagtttacaattctttcatgatttcctttgacccattctttgacttttgcttatttgctttctctctttgatttcagtcgctccctctttcctctaccttccttcctttcttcctccccacctcttttttcttttcttttcttttttttctttttttggtttttcgagacagggtttctctgtgtagctttggagtttatcctggcactcgctctggagatgaggctggcctctaactcacagagatccacctgcctctgcctcccaagtgctgggattaaaggcgtgagccaccaacgcccagcccctcctcttttttcttgctttcttcatttttttccttgtatgcctacttacatgtctggttctatatggttgaacacatcaatatctcctactcttttacttccatccccatagctgccatctttagatgatcattatatatggtgtgctttctaatatgtctcttctctgctcattctcctcccccacccccattcctaattgtcttctacaatcccagggagtaaccaaacatgcatgttatagcacccttctagttaatctacctccatgggtgccaggaggctttcatcatgtggctccaatcacctccaagttttactattctggtgcaaatacgtctccgcccttctgaaccactagtgattcagaccacaatacttcctctagttggaacatctgtctgttcttcctaatcgtaattacagctcaggagataaggtaatacaccagtgacatagaaacaaggagaaaaattacaaacctggatggaagtgtttgtctatgtaagatgagcatggtgagtgctaaaacacagacaatgcagggaatctgttgtggaatcattctaggcattttggtattttggtaagaaactttgaataggctaggccttttgtgagaacaaccaaaagatgcattattgcatctggcttctgttacctcaagttcataggcattagattagacagaaaacctttgttgacacttaggcacagagacccatctgtgcaaatgtgcactatattatgttcaccatgttgtatatatagtagaacaaaatactacccatgtaagctgagaacaatgcaatatgtggtttcaaaaacagcaaaattgtcatattaagttggcttgtcaaaggttctgcttaatggtgatttttattgctaataaagccattaagcaccagaaaagatgaccttatcatacacttaacactttggcttcagtatatgaatcaatatgcaattgatttaattaaggaagctgcagagagtttttttcacaacgtgactcattttacatctgtaaatattcaactgccaatgatttttctatgactggtatgacttttatgaatttaaaatggatttttaaaacttgaggactgattctacgttgagtatttatcataataagttggaatgaatttcttaggcctgaaactttcatttttcaaaaaaaaatgtatcttatgtgtataggtgttttgcctggatgtttttgttcccatgtaagtacctgttacccaaggagatcagtagagggcgttggatcccctggaactggagttacagatggttgtgagccaccatgagggtgctgggaagtgaaaacttggtcttttggaagagcctgtgctcataaatgctgatcatctttccaggccccattttgttttaggttacatgaatttaagaccatcacattaacctaattagctttccattatcctaaagaaatgattactttccccctttggcaaaggcagcaattcttcatctctggagaaatatagtaccaataaaaatgtataaataatgtcacttaagtagctttggtaagttgcatttgataactttcataaagtgtgaatatagcctgttgaataatctgttttgctatttcatttactgtgtcttacactttagcatataagcaattggaatacagaagttcaaatttttcattgaatcactgacaattcttggcatatagttggtactcttgactaaatgaatacacgaatgtggcttacatgacaattttgttgctgtaatgaagactggcaattcacttattttacattcttcatatgccacttctacaatattaataacctattctccttcctctaactgcttaagtattaatggatatgtatatgacctaaggctacagtcatcaaatttgaattaaattctcgtcacctattacagttgaacacttttataaaatctttatttaagacaatgtgattttcctggtcataaaatataaaacatcaattatttcaaaccaaatattatgtttatttttaaagaatttttaatagaataatgaagcctacatctgggtgaaacatgaatcacttggtaaattcataggcttgaaaataaaagcaaccttgagaaattatctgagacatttcttggactgccacctcaatttctgtcttctaagagttcaggagggggatatgatatagaaataatggggaaaagggtagcttattgaattactttaatccaaaatacagcagtatctcaaaatattttacattggtatgaattttagtttattgatattaatttaaggttaattttgttagactctatgtatgtttctactcttgtttaagatattgtttatacagtacaattaaaaatgtaatgtataattaagaaatacagagttgcaaaatacagttagtcatctataatagtcaaacatagtcatgttttttttaggttttctagatatacatagctatatttcagatagataggtattttcaaatatttcaaagatgtacagaatatggcatttaaaatgttttaataacttcgactcttcatgacagtgaaaccaataattcgactctttttgacagtgagaccaataaactccagaaaagataatgcacatcaaagaaactccatatggagtttattttctatatggaaaaatctatccatgtgggcaaaaaaactgcccttgcctcaattgctgacagttactgaccaaagtagaccagcaggacacaagaaaggtgactgctaagcttttccaagataaggtaagacagtccttcaaaattccctgcttcacaggaaagtctgtcagatatgctaggcctgcaggattgattacccaacattacagaggacacttggatgactgtccaggcagtcggctgtttctgtcatttctcacatgttttggaatttccttgcctgcacttcctgcttgctcaagtaatatttccttcttaggtcttcaatggagttgaagactagataattatagtttttcttagttaatataaaaataaattagatataaaactttaaatccaccaagatagctaattaagcattttatctatttttgtcaaatagactaattcttacttgataactgctttgttttatgtaattttattatgttaaagttaaaaccttcctttttgattagacgcaaagggggaaatgatgtaggataatcagttggtatactgtgaatatgtattactctcattggttgataataaagcttatttggcctatataaatgtgacaaacaagtcagtgaactgatactaagaagatggggaatttaatctgtgaagaaaggtggtattggctatgtaatgtgtgtaattatattaaaattatttgaaatgatttcttttaaaaaagagttcaggagatggctggggaaataactcagtggttaagagtatgttactgctcttacagaggacccaggtttgatttccatcacccatgttgagtagcatacaatgcctataattccagttccaggagacctgatacctttttctggcctctgagtgtacctgcaagcacatgtgtatatttacatacatacatataaataaaaaaattaaaaatcatagcttaaaaatataagccaatttgtattaacattattttggaagaatctgtgttgaataaattcctttggtaacccagtctgaaccagaagtttgtctttacgtagcatctaagtcctttcttggaaaatgccaacataatttgactattcaatatccagtgaaggttaacaaaaaggtaaccagaaatgtattcataatgacagaaaaatcagtggttgttttgaaaactatcctcactcttcttagctttgctcaatttatcttcacttgtccccctcccaccaacaaactcatatattgaaacaaaatcaccagtggaacatcattgggcttggaagaggtgagctgatcacaagaacagaattctcctgaataggattagtgacctcataaaagaggcaagagaaggcttgggctcagttggcatagtgcttacctaacatgtgtgaagccctgggtgctttcttcagcattacatcaactgggcataatggcgcaggattagaaattcaaggtaatccttcactacacagtgagctcaaggtccgcttatgatacatagaacctatcttataatgaattaaaatagtctaaagagagacaggaaagtttcccctttctgccatgtgaagacataacatgaagacacaactcatgagccaaaaggtagaccattatcagttgtttaccaaatctgtaccagtgtggattttttttttgtcatttttaaaattaatttttatttaaattaaaaacaatcttattttacataccaatcacagtgcctctccctcccttccttccattcccccaccaggccccttcccacctccatccactcctcagggagggtgaggcctcccatagggtatcatcaaagtctgccaagtcataccgggaagggcctaggccctccccagtgtatctaggctgagagagaatccctggatggggaatgggctcccaaagcccattcgtgcactagtaataaatactggttccactaccagaggccccccaactgagacctacgttcaggaggcttggttcaatcctatgctggttctgcagctatcagactggggtccatgagctccctcttgcttaggtcagctgttcctgtgggtttccccagcatagccttgaccccgtttctcatcacacttccctttctgcaactggattccaggagttcggctcagtgtttagctgtggctgtctgcttctgtttccatcagctactggatgaaggctctaggtagtcatcaatctcattatcggggaagggcatttaaggtagcctctccactattgcttagattcttagttggggtcatccttgtggatccctggagatttccctagagccagatttctcgtcattttctttttaatactttttaaaagttaggatgcaaagtaatgagtttcttcatgacatgtcattgccattcattttcattcattcttaccagctcattttattttcctctttaaaatactcccttttattaactacttcattttatttttaatttttaaattactactttttattcttctctcttataaaatacaccctgagcactgtttctcctcctgcacccctcctagttccatcccccacttccactctccagatccactgctccttcatgtccctgtcagaaaagaacaggccttccaaggatatcaacagaacatagcataacaagatgcaatgaggctgagcacaaaccttcgtatcaagtctggacaaggcattccagtaggaggaaaagggcaccaagagcaggcaaaagagtcaaagacacccctacttccactgtgagaagtccaccaaaaaacacaaagttaacaactataacatatatgcagagcacctagcacagacctatgcaggctctatggttgccgcttcagtctctgtgagctcctatgagctttgcttagttgattctgtgggctgtgttttcctgctatcttccacccctctgaatcctacaattcttcctccccatcttctgtgtgtttcccggagctccaggagagggacatgatagagatcctttatcctatattttacctctcttaagacctcttcctccctttcacaatctcccttttagttttgtgacttcttcccatataaatacacacacacacacacatacacacacacacacacacacacacacactcacacacacacacacagagagagagagaaagagagagagatgcatgtacaatttaaaatttaaattttattgagagaaaataatatgatatttgcctttctgagtgtttgactaatatcttgatcttacaccttgcagtacccataactgtgagaaaaatcttctattgtctacaagccattcaggtaaggggggatgtatgaagcagaaatagaatagacataatgggtggagggaatggtttgggaggggacaggaacagaggggatcatgtgagaggagaatggagggagcaaatagtgggagagacaaattgaattggggttggacatcacggagacaagttatgcaactgcaatgaaaactcccaggaatctacaagagtaactgtagctgactccttgcaatggggggtatgaagcctgagctggccatttcctgtaaccaggtaagacttccagtggagagattgggacgccaacacagccatataacctttgtcctgtgatttgtcttgactacaagatgtgctggaacaaaagtggcacagaaattgtgggagtggtcaaccaatgactgattgagcttgagcctcatacctctagagggagcccatgcttgacactgtctggagggccagtacacagtgggtacatagcccagagatctagattagatctaaatacaactggcaaaagaaagtcactgaaatgatccctaatgatattctgctacacttattgattcgtgcctacctcaactatcatcagaaaggtttcatccagcaactgatggaaacagattcagagacccacagccacatattaggtggacctcagggaattccactgaagagaggcaggaaggattgattgtaggagccagagcaatcaaggacagcacaagataacccacagaatcaactaacctggactcacaggtgctcagagactgaaccaacaaccagggaacctgcatgagattgacctaggccctctgcatatatgtttcaattgtatagcttgatcttcttgtgagactcctaaaaggggaagcaggggctagctctgactctgttacctgcttttgggaccctgttctacatactgggttgcctcgtccagtcttaataggagagaaggtgcctagtcatattgcaacttgatatgccatgttttgttaatatctatgggaggtgtgtccttttctaaagagaaatggatggggggacagagagggggaggggaggtacttgaaggagaagaggaaggggaaactatggttggtatgtaaaaaaacaataagtcattcagattatgatattttgttatagtagcacaaatggactaaaatacatatatttatgttcctataccttcgcttcattgtctccactatctggaatattcatctcttgttccagtttaatagttagacagtttttcatttatttcaaaaatgtctgttaaaatttgatgtcactgcttagaatgaacaataacaataacaaaaataagccctttggtctgttcttaaaaagtctccaatgtaattgacaaaaccaaataatataaggcagagtgagctataggccatgaagtaaatctaacttgtgtctagtgatgacaaaatcttattgaaatgcaaacaagttggtttatttgtatgttgtctaaagcaacttttgccatacaatgacagagtttatttgtatatcaggcctacagatcctaaaatacttagtatctgatgttttacagaagaagctcacaagcccttgattcaatggtgtaagtaattaagagatcactgagtggccaatattagtgagtataagcagtggatggtataggaatacattagaatagtgttttgtagtctgtgtgaaagagcaagttttccctaacccaatctatcagagaataaaattcttcctaaatacaataaaaataaattactagagaaatgaaacaaagatgtacaaaacaagtaatccaatttttgcattagatataatcaagagaaaatgataataaattttttattaagagacatattaaccagtttattataggcccggcagagtagggagactaaaagagaagaggaacagggttaatggttgaccgccatggctggttgccatagaggcagagagcataagagaagagagagaagagaagatcagagagagcagagcagagagagaagagtagagagagagaaaaaaatttgtaattgttttctctcagcacttgttttccttagaggcccacatcaaatagtcaccatatagacaccagtctatgtgtcatgattttgattagcacttgtcttgaaaatgactaaccaagccaacttctcttctactggaggctctatgttcatatagcatttggactcaaattatagttgaggagacccacagactatgcttcaagcattccttctcattttgacaaaattttttataaatctgatcacatgcattatcctgatatggtatagacccgagagaataaactaagctctttttaggaatttatcaggaagtatgaactcattctatttaagctaacaggatagcatttttcgtgaaaaatattaccagtatttatgttttattggttgacaaatgcatataagaagttaagtcatatctattccatatattaaatatgattgtggttacaaatccagttatatttgttagaactcatgaaactatatgctgaaaggaacgatttgttatagtgtggaaattatgctgcaatacatgttgattaaaatgtacactgcagggctccttcctccagagtgtctttagtggctaggaagagctggctcagtgtaggggacagtaagccacgcctgttagaggctggctacaggtatgcctgaccacgcctgtcaaggggtggtcaaggtgaggtcagaatgacgcgtgataggttcttctttttcgttttttgagacagggtttctctgtgtagctttggagcctatcttggcactcgctctggagaccaggctggccttgaactcacagagattcacctgcctctgcctccggagtgctggtattataggtgtgtgccaccaacgcccagcctcaggataggttcttaaggaacggtgagcacatgggaagcctttccttgacaagcatggtcaggcacacctgtagccagcctctaacaggcatggcttactgtcccttacagcaaggggcatctgaagtatgcaaattttattggctagaagctcctgaatgcatttcatggggaggatgcttttccttaaggaatacaaatacttaactaggagcacaagccttcctctctccatgatggactgtttggatgaagccaactctagtttttgaaatttgttaaccctttttatgattaacacttgcttctcttaggtaagtacactaattgaattaagtcaagtacagacagtctgaaagcaattttattttattaatttttttctgcagttggtgtgtttattatccatattcatgaccaactttgtgcttaggggcttttttttttcttcttttattttaaagcaataagtgaaggcatttctttaaaaggcacctgttccttaaacaggtaggaaagttcccaaccgtttcctcccttcttggggagcagccccatactggcaccctagaagcattcagcagagcaacccttcccctccccagtccttttccccctttcccagcagctgggatgagtgtggtattccacagctcatttgatcttcaggttcttcaaggatgactccaagctcttcaaatcccagatgctcatgccgccgtccatgcctgtagtgcagaactgcgtgcacttggccttgcccccgctgagcaccgagatttgattgatgctgttctgatgcagcgaatccaggccagcatccgtggatgcaccaccctcagagctggcttttttgtcgaggtactggaagtgttctcgagctgtcatgccacgctgggagtgggagctctgcttgggcacatccagccgaccaccaaagctcaatgtccctgcagcactgtcataggtaaatagcaccgggaagcagttgtggcccgctgccactagactattttctgtgatgaaggtgatggccaggaacggcaaggtttcagaggccagggttgcaacggccatcttcttgtcagcatctgccaggcacacggtgctgtcgtggcttacccaagccacacggctcccactggccgagaagcagacatcatgcacccagccagaactgctggactcgaacatcagctctccaaaaggcatcttagagccccacggtgtaggcgctggccgctcctccacctccttgatataggcagagaagatcatgcacttgaagtcacaggagcctgcagctaggagcacgttgttggggtgccagtcaaggctgaggacagaggagccgatgtgctttttaatgtgtttgcacgcccaccaatcattcacctggtcaaaataacagatggagatgacatgggggccactggccacagcgaacttcttctcattgggggcccagcgcacataacgcgcagctcgtttgatccgcaggatgaccagagtgggcttccaggtgcggcccttcagggtccacacaaaggcattgcagtctgtgctacaggtcacaatgctgttactctcaggggcccagtcgatgcctgtcacctgcccgttgtgctccttaagctcgtggaccttgaaacagttcaaagcatgaaagctgaaatagacacaataaagaaaacacagaatgagaccatgctggaaagcgatctgtgttcggtccttgttccaggcatggcagctgatgggctctgccaggaatctgtagtaggccatagttacttgtctcctcggggcgcccggccacaagctctggacagtcgacacgcccaactggctctctgaaagcaattttaaaagtacaaggtgattatgtgtttctgtcctgttatttgtttgcaatgttctccattaagacaagcttcttgcagtggatgtagagagtgccaaggttatgagttgagtggtgagagtatttggagggagcgggcattggttgactaaagctacaagtttcatgatagaaatacggttaatgtggctactcatggtaagaatttgtctagaacattatcaaaaatgggcaactgaaggcatattgcttgagtcattccgtatgaaccacaggatttccattggaatagtaagaaaaaacagatttatcttgtaggtaatgacaatctattccaagtttttccatagaggaaatgtaatccttgctaagactctataaattaccacttgttcaggttgatatataacccacacacatacgaacatctgatttttgacaaagaagctaaaattatacaatggaaaaaagaaagcatcttcaacaaatggtgcttgtgtaactgagtgctggcaggtagaagactgaagatagatcagaatctatcaccatgcacaaagcttaagtccaaatggataaaagacccccaacataaatccagccacactgaacctcttagaaaagaagtagttggtaccctcaaacgaattgttagaggagaccacttcctgaacattacaccagtagcacagacactgggatcaacaattaatagatgggacctcctgaaactgagatgcttctgtaaggcaaaggacacagtaaacaaaacaaaatggcagctcacagaatgggaaaagatattcaccaaccccacatccaacagagggctgatctccaaaatattcaaagaactcaagaagctaggcaccatcttactcctgtcagaatgactaaaatcaaaagcaccaatgatagcttatgctggagaggatgtggagaaaggggaacactcttccactgctgatgggagtgccaaatcttgcagccactttggaaatcagtatggcagtttctcaggaaaatgggaatcagtctaccacaggattcagcaattccactctttaggcatatactcaaaagatgcacatagtattttttatgtctctgtctttaaaaattcatttgaatgttgcaagatattgaccaatgattggaatattttgttctagttctttaacacgctcccacttacacaagctactatcacatccttatttaaaaaactgacatgtagtgctaactcatgtttaccttgacttcatatgcttggccagtggttcagacgtttgttgtgaaactgttggaagcttaccattaaatattcattgaatgtggaaactatgttaggaaaagattggcaccctgaggactaaactcaactcactttgaggtttgtagttgtttcccaatttgtctcatggaaccactttgtcatgtcttatgatggtaacacttggttgccaagtgtgagttgtagtcaaaacgagtttcggaaacatcaactttgatgtttgcctaggagttaggactttccctttttgagaaaatggaatggagcccaagatgttactagaattttccatatcaaatatgtccattctccatccttacttctctccctatcgatggcctgagttttcctcctctgagtgctcacaacatctgctgctgtttctttcacagtcttttccccattgtgcttaccacatggatacatgtgcttacttctcacacactgaggggactttgacaatggtagctactgactcatagtcacctttatgtcaccaatggctactgaactacctgaaaattttggctagtttatcaatatttgtttaattgaacacaaaaatatattgataataataaacatgaagtgcaattactttctaccatgaacagctttgagcttttaatgaccatcaattcacttaagttcttaaatttttacaagatattgatggtataaacgtcaggaaacaaagaacaatgaagtatcaggtatgttcagaatccaacatttttctttttaaattgggtatgtgtttcttggaactggagttataggcagttgtgaacaccatgtgggtcctggaaacagaactcagatcctctgcaagactagcaagtgatttgaactaccatgccatctctctatctccagtggtcagaattataaagctggtaagtggcagaggcaagatggaaactctcgacttcataaacaattgctgtaccatactttgtctctcaataaaactgcctatatacaacaaagctatttatttatggtttattctggaattcaactaccatttcctgtggctacttctcacttctttatatggttgttgcagtgctgccaaattatacggcagttaaatgtctttataaactatctagtctcaagtatttcattagagtgatgaaaagtgaactaatttaacatgtttctttgcacatatatttttggtacatttatatacacatgcaattatggaactatgtgctgttgttttgtgtatttaacatatcatgtatatgcctttgtgtgatttgtttgcttatgatatgtcctggttgttgtttcatgtcaaaacaaataggtagatctgcactgattatattgaattagtctatatattcagaagtatggatggtggatttttttaaaaaaaaactatttctctattgatggttatttaagttatttctttggggctactatagagaacactgtagattattatgtttgagtatagaatttttttcagggagattaaaattaagtcatttttactctagtagatataggacaaattgttttccttaaggaaaacagtggctctagtagttttgaaatacagaagacaaactacataaatggaaagatatgctgtatccctagatagaaaggctcaattttataaagattacagctttcaccaagttacatttggttttaaaatatgctagtagggttttcctggtaggttcactatatctatggtgtgaacatttgttttaggcataaaaattccatttaaaggctaagttgatcataagcatcataaatttaaaaacaggtaaggctatacttactagtagctgctatttattgatattgcctctaatgacataacaaaccctcatgtctcacgtttattaacatacagattggaatattcacactgatctcctagactccaaagctgagactcataaccgagtttcactgcctctatatttcaagacaagtattcaaatagtatctgttggtaacaaactcacataaatttagctttctattgtttggaaaaatatttaaaatatttttgctgttcttactcactattgtcttggtaattaatgatagagtgatatttgatcctcttagtctatgttttgttgtcttggtgtccgttcttcctcctccccctcttgttttctcctctactttccgccccccctctttcttctccttccccaccctgtcctcctctcctaattattctgatccatgttgagcctgtcaaaatcttgtgagttcagagccctgatttttccacaggaggaagagaaatggcatttttccacagagccatatctaattttagcattgtttatgcaatgactttgaaagtatgttttcacattgatgttattctccttatgtagttcttttggtctaagcagcaatcaaatgtttaaaacatgtataaagggaaaaggccctgatacagcaaaattaagcaaatattgaatgaactcctactatgtgtcaacattgtaacaggccttttgttgatacagcaacaagtaaaacaggcagataaaaagcaaagagaagacgaatattaatactaaaagcagagttgatggtaatgaaaaacaggcttgaaaataactcagtaggtgacataattttttctggaaaccgattgcctacaactctggacttacattttacagtatgattattttatttaattttattgaaacaattcttagcacttagtactaaactcagagcctggtgcatgttaggcaaatgctgttttggagccccaacccaaacatttaattttactgtaaatgagaaaaggcaaactgttacactttttcgatttttgttgcttgaaatcacttactaggtacacatgtactgggttggctattagcttgcagttattggagcaccaagtgcttccacctggataaagacttctgctcaaagtttcatattttttctggaattatgtactctgatataaaatgaagactgtaatattaaccatgtgttagtgacatgtagtagcttagattcgaggaatgtacactttagtaggtattttataggatttaaattacattgtatttatttgtgcatgggttggtgcttgtgtgtgtacatggatgtgtgtgtgtgtgtgtgtgtgtgtgtgtgtgtgtgtgtatttgcacatgcatgcaacagggtgcacccgtagaggttaaatgacaacttgtgagagtcacttctctttctaccatgtgggtcacagagatcatactcaggttattagatttggtgcctttttctgattaaccaactcaccataccttaggaattttaacaattatacatagaattaatgtggtactatttgaatgtgcttcactgtctcctgtgttaacaatcagtcttgagctggcagcactattttagaagttggtggaaagtttagaacatgggcttaattagaaacaggaggccattggctaatgtatttgaaagttatacctagtcttcagttccttttcttcctttgcttcctggggactataggtgaaggtcctgtttggggggcagggtgtttagtggatctagaaggagaaatggagaggagaggtgtgttaatatgactaaaatattttgtatgaagttttcaaaaaataatataaatatattattcaaaaataatgggaatctgctagcaccccactcttctattctgaagccgacccatccannnnnnnnnngccaaacctaagaataataggtgtagaagaaggtgaagaaatactgctcaaaggtacagaaaacatattcaacaaaatcatagaagaaaacttccccaacctacagaaggatatgcctatgaaagtacaagaagcttacaggacaccaaacagactggaccacaaaaagaagtcgccccgacacataataatcaaaacaccaaatctacagaataaagagaaaatattaagagcagcaaaggaaaaaggccaagtaacatataaaggcaaaccaatcagaatcacacccgacttctcaatggaaactctgaaagccagaaggtcttggatagataccctacaagcactaagggagcatggatgtcaacccagactactgtacccagcaaaactttcaatcactatagatggagaaaacaagatattccacgacaaaaacagatttaaacaatacatatcaacaaatccagcactacagaaggctctggaaggaaaactccaacccaacgaacataactacactcacaaaaacactgtcagtagttaatcgaatttcaccaaacacaaaaagaaacagaagggcaaaatccacacgcaatgataccaccaacaataaatccaaaactaagaagaaccaatgaacaatggacgttaatatccctgaatgtcaatggtcttaacttacccataaaaagatacaggctaacagaatggatacgaagacagaatccatccttctgctgtttacaagaaacacacctcaaattcaaagacaggcgatacctcagagtaaaaggatgggaaaagattttccaatcaaatgggctcaagaaacaagctggggtagcaatactaatatctaacaaattagactttaaactgaaagcaatcaaaagagataaagaagggcatttcatactcatcacaggaaaagtccatcaagacgaagtctcaatcctgaacatctatgcccctaatacaaaagcacccacatttgtaaaaaaaacattactaaagctcaaaccacacataaaaccacacacacttatagtaggagacttcaacaccctccttataccattggacagaaacactagacagaaacttaacaaagaaacaaatgatctgacagaagttatgacccaactgggtttaagagatatctatagaacattccatccaaacacaaaagaatatacctttttctcagtgccacatggaacctcctcaaaaattgaccacatagttggcagcaaagcaaacctccacagttacaaaagtattgaaataactccctatatcttttcagaccaccatgcattaaagctagaattcatcagcaatacgaattgcagaaaacctacatttgcgtggaaaatgaataactcccaattgcaccattccttggttgaggaagaaataaaaaaagaaatcaaagactttctagaatttaatgagaatgtagacacaacatacccgaacttatgggacaccctgaaagcagtgctaagagggaagttcatagcactaagtgctcacatgaagaaactggaggaaagtcacattagagaattgacagaacaactgaaagctttagagcaagaggaagcaaactcaccaaggaggagtagacgccaggaaataatcaacctgagagccgaaatcaacaaagtagaaactaggaaaacagtacaaagaatcaatgaaacaaagagttggttctttgagaagatcaacaagatagacaagcctctagccaaactaaccaaaaggcagagagagagcatgctaattaacaaaatcagaaatgaaaagggagacataacaacggacactgaggaaatccagagaatctttaggtcatactttgaaaacctgtattccacaaaattggaaaacctaaaggaaatggacaactttctggataaatatcacttaccaaaattaaatcaagatcagatagacagtttaaatcgaactataacccctaatgagatagaagcagtaatcaaaagcctcccaaccaaaaaaagcccagggccagatggcttcactgcagaattctaccagaaattcaaacaagagctaattccagtactcctcaaactgttccacacaatagaagcagatgggatattgccaaactctttctatgaggctacaatcactttgatacccaagcctcacaaagatatgactaagaaagagaactacagaccgatatccctcatgaacatcgatgctaaaatactcaataaaatattggccaaccgaatacaagaacatatcagaaaaatcatccaccatgatcaagtaggctttatcccagggatgcaaggatggttcaacatacgaaaatccatcaatgtaatccactatataaacaaacttaaaaagaaaaaccacatgatcatctcactagatgctgaaaaagcctttgacaaaatccaacatcccttcatgataaagatcttggagagaacaggaataacaggaacatatctaaacatgatcaaggcaatatataccaaaccaatagccaacatcaaagtaaatggagagaaactcaaagcgtttcctctaaaatcaggaacaagacaaggctgtccactctctccatatctcttcaatattgtacttgaagttctggctatagcaataagacaagaaaagggtatcaaagcgatacaaattggaaaggatgaagtaaaactttcactatttgcagacgacatgatagtctacattagtgacccgaaaaactctaccagggaactcctacggctgatatacaccttcagcaaggtagcaggatatgaatataactcaaaaaaatcagtagccctactatatacagatgataaatccaatgagaaagaaaattagggaaacatcacttttcacaatatccacaagcaacataaaacatcttggggtaacactaaccaaataaagtgaaatatctgtacaataagaactttgagactttaaagaaagaaattaaaggagataccagaaaatggaaagatctcccatgctcttggataggtagattctgtctggggtgggactgaagatcttttccccttctgtaggctttttgttcttttgactgtgtccttagccttacagaagctattcagtttcatgaggtcccctttattaattgttgaccttggtgtctgtgctaccagtgttttattcaggatgttatcttctgtaccaatgtgttcaaggctatctctcactttctcttctctcaggtgtagtgtaactggatttatgttgaagtaatttatccacttggacttgagttttgtacatggcaatagatagatctttttgcattcttctacatgacaaaatccagttaagtcagcaccatttgttaaggatgctttctttttttcattgtataacttttgcttttttgtcaaaaatcaggtgctcataggtgtgtgaatttatgtctggatctttgattcaattccgttgatccacctgccctttatggcaataccatgctgatatattactctatctctgtggtagcactttaaatcagggatggtgatacctctatcagttctgttattatacaggattattttagctatcttgggttttttgtttggttgtttggttttccagatgaagctgttatgtaaaaatttgtgttggaattttgatggacatttcttaatgtctgtagattaatctgtagattgcttttggtaagatgatatttttaccaaataatccaatgaaaaatggcgcacagagctaaacagaacttttaacagaaaaatctcaaatgactgagagacatgtaatgaattgctcaacatccataatcatcaggaaatgcaaatcaaaaccaatctgagataacatcttatacctgttagaatggctaaaatcagaaatactgagaacaacttatactgaagaggatgtagaataaggggaacactccttcactgctggtgggagtgcaatcttgtacagtgactttggaaaccaatatggtggctactgagaaaaatggaaatcaatttacctcaagacacagtgataccactcttgagaatatatccaaaggatgatcaatcataccacaaggacacttgctaaacaatcttcataggagcattatttgtaatagccataaattggaaaaaacatagatacccctcaaccaaaggatggaaaagaaaatgttgtatatttacataatggagtattactcagctttaaaatacattgacatcaggaaatttgcagacaaatggaactaggaaaaaactatcttgagtaaggtaaccaagagtcagaaaaacaaacacagtatgtactcactcttatgtggacaatagatataaatcaaaggataaacataatatgatccatccacagctccagagaagtttggtattaaggaagaccctaagagagactcgtggattacccttggagggagaattagatgagatctcctgagaaaatggggatgaggaggatggtaagaggaagatagtggaatgtaaaatgaaattaaaataaataaataaaagacgacatttttattacattaatcctaccaatcaatgggcaagggagatctttccatcttcttatattttctccaattcttttcttcaaagatttgaaaggataacccaaaagcccgtcccttaaaatgagattgatgacttctctttatgccatcctagagccctcacccagtggctgaaggaagcagatacagacatctacagatatacactgagccgaaatccagaatttagttgaagagagggaggaatgaagaacgaaggggtctgtaccaggttggagaaacccacaggaacagttgacctgaacaagggagagtacattgatcccagatgctgtcggggaggccagtacaagactggtccagtcccctgaacatggatgtcaatatggaggcctctgtactccagggagcctctggtggtggattagtatttttccctggtgcaagaagggactttgagagctcatcccacttgaagggtttcactctggccctggacacatggggaaggaaccaggaccagcataggaagacttggtggactttgcagtgcccccgttgagtgtaaatattatattaaaaaggaacccattctgcaatacaaccctactgccatgatgtgctcttaagcatgagacatcatagaaccataggctgcaccctctgtaactctaagataccacagattctaacccagactttacccaggaaaactttgaatcacctaagatggataaaggaagacattccaggataaaacaaaatttaagcactatttatctacaaatcctgccctaagaaggtgttagagggaaaaaaattaacctgaagagacaaactgtacccaagaaaacatatctcagatcagtaaatcaagaaaggggagaaaacacacacacacacacacacacacacacacacacacacacatacacacacaaacaccccaaaattacaagaatcaataaacacttctcatggataactttctataacagtggtctcagtttcccaatgaaaaggcacaaactaagagattagattagaaaacatgatccatccttctcctacatccaagaaatacaccttaatatcaagaacagacaccatctaagggtaaaatggatggaaaaagatattccaatcaaatggacccaaaaacaagccattggtagccactttaatataacacaagtcaaacttcaaaccaaacctaatctgaagagatagggacaactattttatccattgggaataatccaccatgaagatatttcaattccaaatatcttagcaccaaacatgaggacacccaaattcataaaatagactattacaacttaaatcatatattaacccttacacactgatagtgggtgacttcaatattccactctcaccaatggacaggtgacccagacaaaaactaaagagagaaactggaggtaacacacattataaaccaaacagacctaacagatatttacacaacatcaacccaaacacaaaagaatataccttcttctcagcacctcatggaactttctcctctattgatcacatactcaggtacaaagcaagtctcaacagatagaatgaaactaaaataacactctggatcctatttgagcagcacagattaaagctggatataaagaacaagagaaaccgaaagcttacaaaattagagcagggcgatgtggaacaaacagtgctgcgttctggacaacatgacattactgtttcgatcatgaactaatagaaactgtgctcacctgcgtaagactcacacaagtttagtcctgccaaaatgctggcatagctggggaggtgctctctagaccccacttgtaactggagtctctattgacagtggatggttgctgtgggagggacagtcattctgactatgtgactactgtagcttttctatgttccagtggatgcatatatggacaaccctagctggacttagtagatcatcattatcaacaacaagaaagacacagaatttggagaagatgtgttgttggagagacagggagatttgaaatggtgaatgggagcatagacatgatcatggtataagtgtcaaaagtaaagaaaagatttaaaatttttcttataactcctactgtgtcatacatgtttgtagttgatcatgtttctccttccttccttccttttcattatttttttttcctgagacagggtttctctgcatgtccctggctgtcctggaactcattcacttgtagaccaagccagcctgtctctgcatccacagtgctgtgattaaaggcatgtgccactaccacccgttttttctcctttcttaatgtgaagactatacattagactgcttttatgtctcccataacacttaacaaaaaatggtttttggatgcatgatttgagttgagtatagaacagaaggaaagagagcttgatgaaatgataattaataataataataataatagtaaggctatacttataataataataataataatccagtagctgttcaaagcagaaacaggcacccacagctaagcactgaaccatacccctggaatccaattgtggagacggaggagggatgagcaagggagccaagatggtgctgcagaaacagtggacctgaccttgtgagaccatggagacactagtcataatgccacggaaacagcattggactgaaccaagccctcggaatgtgggtgccagctaggaggccaagacagtctgtaggacctctaacagtgcagccagtctttaaccctagagcaataatggactttgggaacccactccctatgaagggatactattgaatcccagatacagcaaggagagcctaggccctccccccaatgatatgacagactttgaaggtccctggtggagggcttcactatccatggtgggaggtgggggatgggttggggagggttgttggggaacatgggtggatggtagggtgagggaaatgtggggatggatatgtaaatatgagtagcaattaaagaattaaaaaataccaaccacagtctcagtgtactaggaaagagatcaacaaaggaactcagagactgaatatatcttatacatcctaaatttatgacaagacaatacataactgtgggtaacatcattacagcatgcagctgtatatatgacaagatagataaatttcttgagcaagcattgagagatgaaacaaatttgatgtagaaatccttttctgttataaacatatttgaaaaattagaagatgattcatacttttaaaaatttagaatggccccactggaccatttattgaagaataaaatgaccctagaagaaatttctttcctcatagagtcataaccagtgaacttctaataagttaactgttttgcttctttcaaaacttgaaatgaaataaccaccattgaatgcagatattgaggggactggtataattatccttacatatcccagggaacattttaaaatcttgataacaaaaagcttacaagaaacaagcaagctattgaaggcaaaaaatcttttgaggccattaacagcaagtaaggcaaggaagagaggaaacataattattacaaatattattttccagttaagtaaacattacataaagagaaatgttaaattcgaaaaatgtcacctgaacatttttgaagtggagactggtctattggtctagggattataaaataatcatagaatcagatcattccgagtgctaatcttaaaccacttcatgaaattgacatgcatgtctttaataactcattttccttttctttatttcatatttattatccctagaatttcataaatgtcataatacacatttagaatcatgatgccttctctttatttctaaaatcattatctcggatattactgcacaatttcaaacatttgagatctgacattgattgataaagttattcataatgcattcctattgccaatttaattacttcggggttaaatgaagaagcattttacatgatatgctttaatatagttcaattattgaaaacaaatcaaacaagtagtacatttcaaaaatgaaagatgataataggacatcttttcagtggaaagctttattttaaaatgcagaatatttataaattaatggcatacaagaagatgaattccttgtcctttctctttaaatatcagcatcatcaaatattaagtgcctgtaaatacctactctaattgatctcatgcatttccttgaccttgatacatagctgactgtgtccctaaagaactaaatacctgttcagaccttctgcttgtctgcctaactgattccttcctgtggctaaattatttcttccccaaaccctattccccctaggatttaacctcttttctccaaagttcatgtatatgtcacagcccatcagattaatgctgtctgcaggacttgtcagtaaaatcagcctgcagtgatggtagtgctgtggctttcagcacagcttcaagcctaatacaagcagctcaagtaaggagatgatgtaagttgaagtttcagggcagtgatgaagaggtctcagaatttaaatagcttctgcaaggcaaattgctctgtgtttcccaggtgattgtaatccttgaaatcaaaccacctctcacagtgcacaatgacatggttatcaaatgttttcaatgatttcttgagcatcagaactgaaaagaatgacaggtttaggtttgttcaaaattcataatattgtcattcagcctcagatctgacttgttcctatcgtttggaatgggcctatacagatggcatccacttgcttgccttttttttttcttcagagagacagctgccctagaattacagcagcgtattttaaaaacaatcatatcctttagaaataaatcctcctctcctgtggggtattgtcctgggaaaacttgatactttaataaaaacaaaaccgaaagaactcaggctcagcaatagcttctatcagttaaatgtttagtgtaggaaagagtttccttaggacactctgtgtttttgataaaattctaaatttattttggtcaaatatttcaagtgagaataaatgaaaaataaggagcaacacaatttttgtttgaaacaggtatcagtcttgctccctggccttgacttcataattcttcaactcatcctcccaactgttggatttacaggcatacaccttcatgcctggctaaataatgagtaattctactctagtatttctccatcaatagaaaagattgcatactgaattctaaatgcaaagaagtatttatttgctccaagcactgcttgctaatcattagtgagaaaaataaattgtacttaagggctaaaaccaattcaaatctttttagaaacttatgactacagctttcgaggatgactcagagggttaaggataatgacctaaatttgatatccagaactcaaataaaggtagaagaagagaatccactcctgaaagctatcctctgactttcatacacacatacaaaacaatgacaaactaaaggactttaccactaaataacaatgccagcaacgattatctgtttccttctttaatgaatgagtacacacagaatctatttttaataaagatttagttttaaagcataaaatggacaactgcatacaaaatacttttttatctttttcaactaacaacacatatggagagcatgtctgtttaaatcagaagtacatatctgctgggcacagtggcacaatcatttgaggcagaggcaggtggatctctgtgagagggcagcctgaactacatagtgagttccagaaacagccaggactatgtagagagaccttggttcaaaaaaatgcttatattatactcacatcagcgtttgaggacgaagtggtagtgtctcttgattgtagacagaggacattaccatgtattagaccatttctcttttacactcttccctgttggggcattgactgaactactacttttctgtttgtggttgaaggttagggttctatgttgtaataaagcactgtaaccaaggcaacatagaatttctttggcctacacacccacatcacagttcatcatctaaggaagtcaggacagggaatctggagacaggagctgatgcagagaccatggagtgatgggggaagtgcttctgtgtatgtgtttgtcttactggatgataaaatactgtctggccaatgaagcagcaagttaggcaggactaggagtcaaagaggattctgggaaatgtagtagagaagtggtgatccaggcaggaagtgacatagcagggagactcatatttaagcaaggagaaacaggaagtgtccctttccccctctgctctttctgcagctgcacaatgtaacccactggcaaggagggataccaatggaagctgtccgataagataagtcttttaaaatatatagatttttgataattaagactgagctagcagatgagagatcctaatcattggccaagcagcatttgtacctaatatgtttctgtattattttgtccatccacgtggcaggcagaactcagtcggctggcagagaccgcccatgtggtggtagaactcgggtggcttttggtagaaagatttatcataacacatggggggggtgctgatttagcttacacatcctggtttacttagtcttccttccttccttcctctctctttccttccttcttccctccctccctccctcctgttttctctctctctctctctctctctctctctctctctctctctctctctctgcttctttagaatgttctctctctctctcttttagacagggcttctctgcatagttctggttgtcctagaatagtctctgtagaccaggctggcttagaactcatggatatctgcctgtttcggcctttccagtgctgagattaaagccctgtgccaccattcatgctatctcagcctgctttcttatagaatccaggtccttcagcccagggatggcaacacccacaatggtctgggcactcacctatcaatcactaataaagaaaatacaccacaggcttagctatagcccagtcttaatggctttttctcaatttaagttccctcctctccagtgactttaggctgtgtcttgttgacataaaactagccagaacaacaggctcttcttcattcacactgtgcttcctgagggtaagaacctgtctctcattttatcaccttcccacataggacaccttaataccttcaggattgcttctccaagacactgaactagggcctataaatagctgatgatttaataatactatcaatagctttgttgaatttactttaatatcctgaatagctcatttaattttgagctaaatgaatatgtgatatatgaacgaatagttttgtattttgttaataatagttatttcattttagttttccataagaaagttttaggaaatagtgcatagaggaatttattatcatctcaccctacagataaggagacaaaaaaaaaatcaggtaattccaatagcactaagatcaacaattaataaatgggaccttatgaaattgaaaatattatgtaagacaaagggcaccatcaataggacaaaacaacagcctacagactgggaaaagtcttcttcaaccccacattcaacagagggctgttttccaaaatatataaagaagtcaagaaactagattatcaacaaaccaaataaattaaaagggggctacagatctaaacagactgctcaacaggagaatctcaaatggcagagtaatacttaattaaggagatgtttaagatccatagccaacagagaaatgtaaatcaaaacaactctgagattccatcttatacctgccagaatgcctaagattagaaacacaagccttgtcgcacctatcttgaccagcaagaaggacacgactacgactcttcttcaagcagtttattcagaaaccttgtacattagcttctccttctacctctacctcagcttctcctcagcttctctttctgcttcttctatatctctcccagtcccctggcaagcccttaaaagcaagctcattacccaattagctcatgccacctggcgatcccggataggtcacagctggaggaggcacaccagatccactaagcgctttcaaataaggcttgtttacagctaagctcggtctccctggcatccagccaggtgccatcttggggctgtggctccccacagttcccccttttttatttaaaaataacacaacaggcaagggtagaggtctgattcttcaaatcaagggactttgtaatgaccccacgcccagttatcatctgagctggtgccacacctgtccggtatcttttctcagagatgcatataccaacccatatgcaatcagacatgcccttcatgaagccgcagaacgctgacttcaagtgcagtacttcgtcttgcagcctgagtgggatgactgcttagcactttagtactgttagccaagcctgaggtgactgccctgccttcagggcttcgaaggcttgtgcaatcatggcattacttctcctctgtgacaccctcatcctgcagatacaccataaggctatgaaactaactaggataagcattcctcccagggcacccattcccgcccactctttcagatgatttatggcttgagtgatccacacagacagcccctccacaaccgagatgtagaccctggtggaattcacgtgcactatggagagtctcagctcctgcatcagcttttcaaaatccctagacaagttgcctagaagatactatgaaggttgtttagacatgtttgctgctaaggaataattctgataggacacaactgttacacacaaaccaggcattctccattcacatcccaactgtgccaattgccataaagtatccatttgttcctgtactagatcaatgcgttgattcaaaaccataatgccacctttcaattgagcattaaggtctccctggcatccagccaggcaccatcttggggctgtggctccccacaacaagcaataactcaagctagagtgggaattagtttgctagaggcttcatctagcaactgatggaaacagaagcagagacccccccagcccaacattaagtagagttcagggaatcttgcagaatagggggaggaaagattgtaggagccagaggggtcaagagcaccacaagaaaactcacagtatcaagtaacctgggctcataggtgctcacagagactgaactgatgaccatggcactgacctaggccctctgtgcatatgttacagttgtgcagcttgttcctcttgtgggatatgtgggagttttgggactcctaacagtgggaacaggtgctgtctctgactttttacaggcttttgggatcctactccaccaactagtcttcttgctcagccttaatacatgggaggtgcttagtcttactgcaacttgatatgccatgtttttgctgattcccatgagagacttgccctttcctaaacagaaatggaaggggagtggtttgggggggagactggcaggagaggaaggaggggaaactgtggcagggatgtaaaaataaatacagatatttattttttaagaaaaagatttagggtgattaatttaccgtaatttttgttattaaaacttcaagatgtttccttaaagatcaggcagggctgctcacctatcacaatgtgcacacacttgcgaccagaccttgagagctgaatgtagtggtgttgcccaacgctgtgattccagcactcaggagtgtgtggccagccagaatgccacagaaagaccctgagaaggttgaggtgttgagagttagctcgtttctcatttgtgatcccacttgtaacagaacataaaataaaattgaaataatcgtactttttctactggatatttgagtggggtctgtgtgtgtgggggggtgtaatattctttttattactttatagatgtaagggcaggttattcacatattgtttatatagtgcctgatgcttggtaatttcttttatacatctttgtgatggactaattgacataaacatgacccaatacttgattgtataacctgaagccaggacttctttttcacttgaaggtggaagaatacttcttataatttcccaaacaagttgaaatggcagggtgatcctaacatgaatatttcagagttgaaaaactttgacatcgaagttgttgacaaattaatgtcagaatattctcgggaaaaaataccttagttcatgatacggttgagtggaactctgagtagtttcagaaaagctaagtttgtgaagctatcataaaataactttttcatttattgttgaaggactgtaaagtatacttttcctgaagtagtccaggctttgctccatgtgcccttgtaattgttttccaataatgcagtagtctgatgctgtcattttaagtggacatcctctctaagcaaatcttaagtagctgttcctgtgtttgaaaaaccccagatattggtacttgctgctcccttttcattgattggaaaatctcttagcaggtcacagtgttttatgtcttacaataatcaaagtacttttgggtcattgccaacatgagggagaaaaaagaaattggagtgatgtctctacaaaatcagtcagctttagtctgaggctgtagttcagttgtacttgctcatctttcccacagctctctgttcaagtacctgatatagagaatagtaattttccattaaaggagtaccatttggtccctaatattgaatacaggtaaagttatcgttttccttctcttttctgtcctttactgctttcctcaatcgtcccacccctacttatttgccctttttattatttggaaggaaaagttacaagccaaagtcagtctttgtttttgaggtgaagtcttacaatacaacttggtctgttctcaaattcatgaccctcctgcctaacaccttcctggtactggaatctgtgtgtgagccaccatgcacagactccaaaatcacttttcaaacaaacatttccaggtcttttctgggaagtctgtatttgcctaaagggtaagaggctctctgagattttcactcaccatcggtggtcaaacttgtgcctgattattgctggaggggaatagtttgttgggatccttaccagggaagttggggtttgactgtttcaaagagagtatatgttggagaatcatcatgtgcattccttgaggtaaaaatcctggaggtattaaagaaaacggtactgaaaggcaggcctgtcacctacctcctgaaactgattgtagtgcctagcagagatgcagaattcaccagcctcactgaatagcagatgaaacagtaatgagagtggctgtaagagactgcctcctctctcccttctcctgtgactcagtaacctgggcaattccttcctgttagggaagaaagctgtagtaacagctaatagtgaatgcctaatcaggtaggaactaagagggttccaaaccaagactagtgctttttacaaatcaaaaagggggaaatatgatattttatgcctccaggcaaattagaaccaacatattttaaagtgtaagaagtacacttaaaatatggacgaatatgttcaacttctgggaagtaggatggaggccaaaacactttcactatttatttaaagtgtgtgggatgactgagggaagagggagtaactatttccttttaaaagtaagtgcaagtcaatttgggttgaccagaggatcttcagatgtgtcagtctccatgatcacatgtactaaccttaacactgttctatattcctaaaacaattttaaggcccctaagctctagatgcagacatagttttgcaggagtgttacatgtagtataattattttatgctattaagtaagatgcaattatatgaccagttaattggtcattgtctaatgaactcactttttgcttgttttaaatatttttattttgaaacaaccttttctcattttatataatccctcccatcctcctatttcccccaacctttccccaccctaccccccatctactcctcaaaaagggtaaggtttcccatggggagtcaacaaagtctggcacatcgctttgaggcaggaccaaaaccctcttccctgtatctaggctgagcaaggtatccctccatagggaatgggctgcaaaaaaacagtttatgcactggtgctactaccagcggccccacagactattcaagccacactaatgccacccacattcagaaggcctagtttggtcctatgaaggttcccccactgtcagtcagagtcagtgagctcccactagctcagctcagctgtttctgtgggtatcctcaaaatggtcttgacccctttgctcatattatggctcctccttctctttgactggactctgggagcttgatctagtacttagttgtggaactctgaatctgcttccatcagatgctggatgaaggttctatgatgacaattaaggtagtcatcaatctgattacaggggaagtacagttcaggcaccctctccactaatgcttagggtcttagctggggtcatccttagggattcctgggaatttccctagtgccaggtttcttgctaaccccataatggctcactctatcaagatatctcttttcttgctctccttctctgttcttcccccatttcgaccatcctgttacctcatgatgaactcacttttaaagtatctacttcttaatgttatcatattcatgattaagttttcaactatggacattaggggacatgtttagactacagcagaatgtaaggacatggtaactgctatatggctttaatgagcactagccacttttgtgttcatgggccctttcttgactgaaaaatattaacaatttgtattgtgactgtgtcaatatagataacataattgagtctggctcatatttactttttatattttaaaaggaattatgtattaaatattatgaaccctaaattcttgctgagattaagctctggagttactgtgacttaaggaaaaaaatccgcagttttttttttttttcagaaaaagactgtctgtcttgttcacaacagtatacccaatgccagttgtcaaataggtagctaataaatagttctcaaaaaagaattcaaaagtaagtatttctaaatattaggaatacatgaagacttcaaatagttttttttgttccataaaatattgcaagttgggctgaccgcttggctagaagaccagagtttgattcccagcatccacactgcagctcacaaatatctgcgactccagttccagggtatccaaagccctcttatggaatccatgaacattgcacaccatgtggttgacccataaaaataaagctctagatatacaaaatttaaaaaaaatatttcaaattctctgatattttgaatatgcaccacatttgattcatatctataaaggacctagagaacagcgtaattgtagtcacaagcaataacctagtaaattcttcaaaaagctaaaagaacacatgatctagatcaacagatgatgaccgaatctaccactcctgggtattaacacaaaggactccaagtctgcgtatcatagagataccagagcatcaatatttattacagcaccattcacatagctaagatatagaacctgctagatttccatcaatagatgaattgac

SEQ ID NO: 3 - DNA, 1016315 bp, synthetic construct
  source 1..1016315: mol_type = other DNA; note = ITPR2 Contig Sequence
  misc_difference 1..1016315: note = N can be a,g,c,t
ttttttttttttttttttttttttgagacagggtttccctgtgtagcctggctgtcctggaactcgctcactctgtagagtaagctaaacttgaactcagagatccacctgctctgactcccaagtgctgggatgaaagttgtgcaccaccacaccgggcttcctagcagtttttagtgtaccttttttcagctagtcataggttaagaaactttgaatccgtaaaccttgcaggcgtaccaaataaatggaagtgctggtaggtctcctcagcgtccgctttcttactcctctctgcttgttctgagcaggttccacatgggaagccgatgagcaattctgttaatgcttgaaatgcctggagtgccatcgtaattaaacagcatatgaacactctttggccgaactccaaatcagtggttacgtgtctaacattaatccgatgtatccacagaagctattagactaaacatctggactctagtactaccaaagctgaaatactgcacagtgagttaaaaggaaagctgtagagacataccacagagcacagttggggaatgattgtgctttcaggcagataaatatgtgaactacgtcagctgtcttgacttttctaaggtaaaaattcaatgctgtcgaagtgcttagtttcaccatcgagttcctcagccttttgttactgagacaaaataaccaggacaaacagttctgagggaagaaatctttcttgggtgtgataactttgtaggttccagtgagctgtggaggcatagcatctgctagcaggagcttgaagcagccaggaagcacagagcaggtgtgtgctgggagagctcctcagcttcctctgtccttctgtccagcaccccagcccactgactgatgccgcccacattcagggcggggtcttagcccttcacactgtccagtgttccagtcatctctagactcatcctcacaaatacacccagaagtgcgctttcctaatctagacatttctagatccaatcaagacatcctcacaaccccaaatactgtcattaattggagacaaatttcttacgaagttctcagaccatcacagaatcttgctttgttgtattttgtttgattgctggggttgaaccctggcctcacgaagactgagcatgcaccctgctactcagctgcacatagtgtttggagtattgtcagtgaatagggactcactgtcagttgtagggagtcaccctagcctcgcccaatagtcctggggcaggtaccaggtggatccggggactcgcccagaggggcgtggtgaaggaaagccggggttacgtaagggagcttcttaaggggctgcacatggggaccctggctctctcttttgttctggccgcgctggctgggttctataacctagctctggcctgtgtttcaccttgctgtcctctgaaataaagagaccttaatccaatacctggcgcccaacgtaaacgaacctgaaaagccaacgagcacccagagaatttgctgcatcgtgtttttcagcttgacatgggttttgaagttcttaatcaaatacgtgagccttacgaagcccactgcagtacctttgttgtgtgaggctctccccccctctgcatgtcatggggccagcagcaggcacttctgtgtgagatggggagtgggtgtcagaggaaagcgcaggagcttcagggctccgccaaagaagagaaggggtgttttctgtggctttggcttgatcattcccactgggaaaaatgagttttagttttggggagcagtaaagagttactatagctacagagagcctggagctattttatcaggcccagagcgtgcgctcagggacacttccctcatgcctgtgctggcacttcctaccctggacatggttgtggttccaggtcgctaggtttgagagggtgttttccccaggtgatttccatgatggcttcattggctttgtcagtttacatctccgatagatgagagtaagagttcctgtttgccaacgacattaccaacatttgtcatttgcttctgaccagtttaaaaataaggttttcttaatgtgagggattagaacccagaacctggtagacacatggctgctcctgtggtcagctgtgaacatgggattcctgttcatgtgacatttggtccgtgatgttgtagtctggatttgaaggtcaatctgtaagttgactctcatagcatctgagggcatggagtgggagggtgtggggtgagtggcggtgaatctgagggttggggtgggtggctgtgatgctataatgttgtttttctgtagagtcctggggctccaagactgaggtctggacttagctccctgtctattgtggtcatctgagctcccgagcaagtcagtgacctctgctgttggaatctctggtggtttttgtttgatgagggtgtgggtgagtgttacgtaattcatttaaacacctgtcaatacatttggagtttttaagctgaaaatttggaaggcctcatccaggtgttgtaatgattgtgatgttaaacaactgtggcctgcccgactgttgtgttaattctccagcgtgacggcagcaccagtggctggtggtctccaagtcatcttctaccgtcctagacgcactgtgtagctgtgagagcctgttctagtgccctggctgtcctagactcacagtgtagactaagctggcctcaaacttagagagatccatctgcttctgtctccggagtgcacccccatggctggcatgacatttttagtgatacaaatttccattcaacattctggccctgttactctagagaaaacaacctaagacctggagatgaaggtatgactcttgtgttttccttgtgtttacttcataaatgggtttatttaaataaacttatgaccggtggctcaatttagagaaatgaggtgctttacctannnnnnnnnnnnnnnnnnnnnnnnnnnnnnnnnnnnnnnnnntgtttgtcatttgtgtcttcaagatgtaacacataacagaatatctgactctgctggtgtaattagcacagagttcatgaactgaaagtcagatccagtcaggtggtgactcacaccctaatcccagcatgcagaaggggaggagggctggtgggcatctctgaattccaaaccagcctgttgtacagagcaagttccaggacaccagagctacacagagaaacacacccccccacccccatctcttgcttctgctctggttgttgtcagaacatctaagtacttaggatagcgtctgtgttttatttttgtttgtgttctaatgtttgggtacttttgattcttgctgtagggtagatgttggatgcccccacccacaaagtccatttttaaaggctgatcctcagtggaactagtagggtttgtaaccttaaggaggtggagccagggaagttcttaggtctttggtgggggccgtgagagtctgtggtgatcgggtactccccactctgcacccttgcactcagctttgccaacagatgctccaaagcactggctggactctgaaaccacgagcctttctcgataattatctcaggtattctgtgatgcagtggaaagctaacagagtcattttcacatataatgtaactatattattagtcttgatttcattttttgctttgtatgtagtttgcatatgtgtgtatggttgtgcactcactgggtggcctgctttatcactgtcctatgcctttgaaacagtcactgaacttggagctaggctggtgacaagcaagccccagcaactgtcctgtctgccctgcactgccctgttacagacgcatggggccgtggccagcttccgggtaaagtgctagggacacctccaagttatttgcacagcaagtgttctttcccaccgagcatctccccagcctcaatagtcttggtattttaaaaagagatcagaaaattcccaggtccttaacagagtgtaatatatttcttaatgaatagctagaccagattcctggttctttgcatttgatccccgaacttagccaactcaattttctcagatgctctggcactgctaagtaaatttggaaactaggttagtatccatgaggtggtgaaaggttattggtgttgaggtggccgagtgtgtggtagggtgagctcttacctgaggaggaaatgtctgttggcctgaagttacctgaaggcagcagaggacgaggaaatggccttttctgatggacctgggaggggggggttgggaagccgcacagacggcccgaagcctctacccatgcttcagggtcagtggcaggagcagacctcctgactgggaagagctgtgggaggctgcagggcccaggcttccgtagaaccctccctggccaccttggcctggactcctatccctacgctgctgaccttcagacatgcttcttcttgattctctgcttctcgagtggcttctcccacatggctcgggtgcatgtatgagttcattttgttaggcatggtttgcaaagttgtgccctgtgatttacacacacacacacacacacacacacacacacacacacacacacacacacacacaatctgtctttttctttgagtatctaattacactgaagcacaggccagattcttttcaaaagttctcaccattttcaaacgttcagcttctagagtttggcatttgatttgttttctagagtcctgagctttcccttgtagttttgggtggattattattgttgtgaatatgtgaaaattcatatgatcagaaatttctcatcttttttaaattggatgactgtataaacttgaacagcatctcagtcggaccatgcatttcacaagtgtgtgttgtgtgtacaagctcctcatgcctgtggaaagtgatggaaacgtgctctctagttaagtggcaggtaagacagagagagcatgtgtgcatgcatatccaaatacgtgcacacacaacatgcatgtatgtgcgtgtgtgtgtgtgtgtgtgtgtgtgtgcgtgcgtgcgtgcgcgcgtgagagagagagagagagagagagagagagagagagagagcacatgcactgaatttttaccgttttctgagcactgaacattgatttcaatccctgttaggccatgctgcacacctcactgtgttcagtgcttaccatctaaaatacaaggatgtgacagcttttccctagaattatgctatgagcatttcctttaatagggatattttctgaaataatataactatcaaaaattaatttatcctttcttcagttaaaggagagacatatagaagcttatgaatctgtaaggctgataaaagcacctacctctaaacctgagagcctgagttagttcccagagcccacaagttgtcctctggctgctacgtgcaccatggtatgtgcctgtgtgaacacttccatgcgcacacacacaaacacgcataagtaaatgtaaaaaacaaaactgtagtttaagtggcccagatgaaggctgagctgagagtggctgcacgtggagggcaggatgccacccaggtcttctctgggcctcaggggagtgagtcacataggtgaggtctgtgctgatcactgtcacttccattgtttggatttcctcatgtcccttggattatcttcaagagtctcacatcttcactggtgacatttgcactgttttgattaacttgtttttagtgaggaaaaaacttgacttgtgtgatatggaacatctttgctgagacaattgcatgtaatactagtttattttctcacttctaagtgatattagacatagtttttgtaattttttgtctcctcttccataaatataatttgcttagatagttccctaaatattttttttaaagaaacagtatctgtgaaactgaatcagtagtctatctgttttgtctaagctccagggaaactgcagagtacaggtgggaatagtgtgggccctgctccactgagatgagtggctttgggagcaccgttcatcagaaacctccatgccctgtattccccacttcctcttgggcactggctgtgagctctgtgcatctgattttgcagcaatggccctgaaccatccttcagaactaatgttagaattcttggcactcacaggaactgggttacatctctcctgaaacagcattagtgattacatgtgtccatttcctaagtgcttactgtcagagcagacacttactaggaaggtgagcctgggtgagtgtcctagtgctctctgcctcagtttcctcacttacttatgtcttgtagtactcagatgggcaatgaaaggttagaggcaggcaggcaggcaggcagagacagtttactgactgacattctgtcacacagtaagaccttagtgctaagtccttgttgtagaacgttgattgagttagtaaagaagaatacattgatttccatttggttggctttttgtcctggagggagaactgccacagtgtgcttgtcctcagtccaccttccgatatcaccgctttctccacagattttcagtacaagtacctaacgtttgctcactgcccatcgaagtgattagtggcatgttcagtcttcacaggggctctagggtgtacacagcattaggagaggctgcccactcacactaacagaagacacactgcaagacagatgcttttcgtaccaccgcaagaaatgggttccaatagttcattgttttcatatttttttgtttaagagtttttgtgtcaataaaaccaaacagtaggaaaatcagcagccatgtatggctttctcatgctaacattctgtccctggctctgcctctgctgggccctggtcttgaatatgtacacagctgtgccaattgatgctctgcattgctgtggttcttttccagttggttcagtgaactctgagccactgtggttttggatgtgatctgcctgtctcccaaaggcatgcatgttggaagcctggtaccttgagttgctgtgatgggtcattctggacctttaagaggggggttccaggggagatgccctcagaaggaatccaggtagtcctcctaggaccccggttatttctggcaagagggctgtttaaaacaggggcctgttcaccgctgcccagccccatctgacaccttgcttcccatcttgttgacttgtgccactgtgaggtgccctccatagtcaccccactggagggcagactcatggactccctcatcttgtctctgttcagacgaccacagcatcttccgtgtgcctgggggaaatagccggtgaagagcccctagcttcctccacccaagccttcaccaggtagagccaactgtttggggcattcattgataggttagtgatttgaaacctaactggaatatggggaggacggaggggggaaatggcgcatgtgctgaaagcagtgcattgtgggacctggcactcccgtcagagttgacccctagagagatggggactgttaagatctgcttgcagtgggtgctcacactggaggccgtgagctaggcccatggtgtggtagtggcccactgtgctgttttcttctctcctgccgttgtcagggtttgatgtcaggctcatagtcccatgcagaggacttcctatggcagtgcaccctgtcagccagaagccaagagtccattctgtccatggttctttgtgatttccaaaaggtaacccaggcagttgtgaataacgaactacttagtttgtcagtgtacatagaaagagaccggaaagcagagctaatgtctgtcttctgaagtggataaagattttgctcatttttgaattacagttattacatgaaaattgtgcatttgtacttaaaccctagttaagaagcaaaattttacccatttaaaaaaacatttgtgtgcgtgtctttgtttctgtctgtcagagtatttgcacaaatatgtatgcaggtgcccatggaggccaaaacagagcattggattacaggctttgcaagctgtctaacatggtgcaaggattaaacccccagcctccatgatagagcagcaaggatccaaatcccaccctctgtgatagatgatagagaagcaacccttctccagccctgagccacctctctctgcagctcagcacaggctgatgcatgagaaagcatctttctttgttagttaggcacgtgttcccagatgctgatcaaggagctgctggtgaataccactgggtgtggaaataatctcgtgtgactatggagttagtatcatatatggcttaggaacatggatgtgtcaggacagtatctgagatgagcttggaaaaaaggaaatggcctttggaatgtcacagtaagagataaattaaaaactagttactggttacaatcaactgaaaggtttaaggaggggttgtcaggatggctcagcaggtaaaggagcttgctgtaacccttccactctagtcagttgctgggacctagggtagaaaaccagaaccattccctgcaagttgtcctttgacctccacacccatgtgctcccacagacagacagacagacagacagacagacagacacacacacacacacacacacacacacacacacacacacactataatagaaaattttttaaagttgaagaaaataggcccttcttaatagaaggattgatattttcatgccaataactttatctggactcagaatgttttatactgaatgtgatttaaattttaaatatgaatcctttaaaaaaattaaggttgttggctgttcttggatacatgatacaataatttaaaatgtcccttattttttccaaaatttttcattgctaataactttctgtataatagaaatttctattttttttaaagataggatttccatctacagaaataacttgaattcataattcagaagttgcttgagcttgttctgtttgaccatattaatcattctgaactatagagtctgactttagaagaggtggtgggcactggcagtgaagacattccacgatgagggaaagctggactccctccaagcaaaagagcgtattcattatcatttccaggggcctccgtaactgaaagggctgggacacatttccgttttatactttttgttttgttttgtttttgtttttgtttttcgagacagggtttctctgtgtagctttggagcctatcctggcactcgctctggagaccaggctgacctcaaactcagagatccacctgcctctgcctccggagtgctgggattaaaagcatgcatcaccgacgcccggctcacatttccgttttatatacaggcatagttttcacacgatgtggcctgcagcctgtatttcagtaggatgtgttacaggcatgtctgtggtttgcatgtgaagtgtctcccacttggtgctcaccagcagtatggttttgagagactgtggagcctttgacgtgaggtctagcaggcagctgtaaggccatgggattagggtttaaggattctatgccagctccaattttaccctacgtagaattcctgatccactgagatgtgagcaggctacctcacacatgagctatcaggaagcccacatgccttcccctccatgatggacctaaagccaaagtaaagccttattctcttgagttgcttgctacaggtcatctgtcacattagtggaaatgctagtaacagactctcttcccgcatgccacattgctgatttacatttgatacaacttagcccatttctctattgtgggacacaatcttttgttaacgccccaagcttgcccatatgctccttctgtgcttgcttcttgtgtcccaggagttaatttgttcaatagttatcacaaagatgctgtctctgtgaatactcagcacggtgcctgccctccttaaagtctgaatacacagcacagcgcttgccctctataaagtctgtgtgagggctagagagatggctcagaggttaggagcactgactgctcttccgcttgccctctataaagtctgtgtgagggctggagagatggctcagaggttaggagcactgactgctcttccagaggacctgagttcaattcccagcaaccacatagtgactcacaaccatcccttatgagatctggtgccctcttctggtgtgcagatatacatggaagcagaatgttgtatacataataaataagtaaaattaaaaaaaaagtctgtgtgaacacgcatctggtaattgacatttttctaggctcagtgttctatgagcctctgtcacaacagtttgtaaatcaatacataacaacaatcaacccattttacatgctacagttaaaacactcagtacacattctgctgcattaatactgttaggtgtatttttccatcagtcgcagcagactctagacaacacaccattgctgtgcctgggggaggagcagttcagtaggcggcaattcagcctacacagggtgcctgtaatcccagcactcgggaggcagaggcaggcgcatctctgtgagttcgaggccagcctggtctacgaagaaaattccaggacagtctcttaaacctacagagaaaccctgtttcaaaaaaccaaaagaaagaaaggatgaaaggaaggaagaaaaagaaatgagaggctggtggacccggtttagtctctgctgggaatgtgtctgcagcagctcagacttttctctgtgctgctcatggcctgtcctcaggtgactgtcagaaccccagtgctggtttttagggtcaccgttttctgcaggtgtcgtggatcccctgtgggtcttgtgagatacctccacacacttgaaccatcttcacatcctctcgagtccatgcagctcagccgcagactccaacaaaaactaagatgctagaattgcaaatgtagaaatctcgaaagaaaaacaagtacctaggtgtgttgctgctgttggaggacttgactgtgtcactgttgctgctgttggaggaattgactgtgtcactgttgctgctgttggaggacttgaccatgtcactgttgctgctgcctgtatttcagtaggatgtgttacaggcatgtctgtggtttgcatgtgaagtgtctcccacttggtgctcaccagcagtatggttttgagagactgtggagcctttgacgtgaggtctagcaggcagctgtaaggccatgggattagggtttaaggattctatgccagctccaattttaccctacgtagaattcctgatccactgagatgtgagcaggcccatcccaaattctccctgggatgcccaagtcattttctcccttactgctcacctgcaggcagtatagtgtgggccttctaattaccccgtggtcaagtctgggcactgggcatatttctggggatcaggacttcagaaggtttcgcctcctggagagttatgcttccgggcttctgttggaaagatggagatactggctctttaggtgatgctcacaaatgagagtggtttttaggcgagttgagatgatgatagtgtagctccccaaatctacagaagccatgttcacctactgacgtatgtcttcatctccaagtaaggctggtccctccagcccgggcaagaggcctctgctcacagtgtgggtttgtgttagaagtagtgtctctgacatgggctgtgcgtgtgtttgtgtttgcaatcacgattaaaagttcaagtgaagcaattcttactcggattggaaagtatgtggtggtatgccaaagcttaaatagtgatctagaacagaggtgctaaaggttacagtggggtctggaacataggtgctgaagtttaaatagggagctagaccgtagatgattaacagagtgaaatcacggaaagtggggggggggcactgaggacagtgggtcattgcagtcacagaggatgtgagctctggggacccactattaggccatactgtgtctagaggtaactcctctatcatgtacttaaaactgagacatcagcctggaactagagcctgagggctcctttcctgtggtgcatttctttggaaggaaaggatttcagtgagatccagagctttctcaagattaaggtttttaatggaaaataataaaatgttattaactagtcttcaattcagaatctttaatttaacaaaggagtatgtaatgtctgatctaaattttgtccaaagacataataccaagagttatatttttggtgaatggggggttcacagaacagggtatctggtggatgagatgtttagtgaatggagtgtcagatgaacagggggcatctggtgaacaggggtgtctggtgggtggggtgtctggtgggttggggtgtctggtgaacaggggtgtctggtgaacaggggtgtctggtgaacaggggtgtctggtgggtggggtgtctggtgaactggttgtctggtggacgggtatctggtaagaagggagctgtgtcctgtcaggactcctgtctccattcctcagtcatctcagaatgatgatgtgactgtatatctaacaggcatttgccagctagtgaaggcatcaggaagtgtgctgaggaacttgctgaagtccatggacttctttgtttctgtgggatgtgatctctacccctgccctggctgttaacatctcacagggcaccatagagggctgggccagcattctgggaagttagcatcaggagctcccatccttttgtgctgacagaaagttgctttggcgccctggagtcttggttctcttcacttgtccaccacaggccttaaggcctcatgagaatgcacacgggacaagaaaagactttagtgttttgtgtaagatttttaatgttgtcggggctggagagatggctcagaggttaagagcactgtctgctcttccagaggtcctgagttcaattcccagcaaccacatggtggctcacaaccatccgtaatgagatctggtgccctcttctggtctgcaggggtacatgagaagggacgattaagttaagtcttctgattggcacatagtgtggccacattgttttcaaaggactgggtaaacagtgaatactgggaagggcatgttttatattgttgaggtagctcttctgacttaatgaaatcaagaaaccagctgtgagaaaaagacagacatgtatgaggggacaatctccttcagcccggtgtccatagccctggtctcagcagctcacagaggtctgtggaggccaggggaatgtgacacaagaatgcacactggtcagcaggacagcgcagcaagtgtgattaaaacggttcagtcatttatgagtcgctgacactatactgaggaacaaattgagaagagagagacagcaccagcatgccattgagcgagtagacctgggacacaattcaagttgctttgagagtaaagcaatgctaacaagagtcgggtgggcatgtggtcggagccacttacccctaggagttctgcccagactttaaccacagtgcggtatttggtgttgtactgctatagttcatatactatagggaagaagttttcttcatttaaaaagcgatgttttaccttttgtagctaatatagactctgcctctctgtgattccaaagccagagccatgacctgaaaccccgatgaccaccgtcagggccgctggtgaccggcaagtgcatcatggaacttaaagtatgggtggacggagtccagaggattgtttgtggggtcactgaagtcacaacttgccaggaggttgtaatagccttagcccaagctataggtaagtaaaatctgtcaagttaaaccaaacaaacaaaaaacgcaaaacggtatttgatccttgtggggtgtggtagtgctgtgtgtgcaaaagctaattttctgagcatcttgataaaaactcctgaaagttaacttaaggggtggggggagatttgggctcatggcttcagatggttcagcctatagtttcctggcttaagatgtctgggcagagcatccaggtcataggagtgcgtgggtgcagaggggagggggaggccttatttccttcccagccgcagcccaccccagggcctcatccctgcactgactgtccccctggctgcagctttctcagaaggtacctccccagaattctggcgcctctgtcgcaggttccccttcaccctcacagcttcacacattgacctcacagagtggccttccttgggctgttgtgcacagtaagaaaaccctgagagaaacacttctaaggcagccctactaacatgcctccgtccatagaaagtccctcaggcgatggaacgcccactcttgagtctgtgagcgatgtggtatggccaggctctgagattctgtgagggcaattcctgttgacacatcacacgcacatggcttctgtactgttgactggccacgcccttgtccgcagcatgctccttttctagtcattgcactgtatttaaagtgtgctcagccttttccatccagttcttacggtgagcctggctcggtagccagcagtgcctgtgccccagcctcatgccatgctgtcctcagacactccccaccagatcagtgacgccgtcctgtttaaactccaccttccagcaagtctcaactatgaacaaaatgtagacaaattctttgccacaacacagcacaaataaatgacttctaatccagttcccaactgagttttgttctcatctgaaattcccaaggcaagccttcattgtcctcattcccttcagaactctgctcttctgaacttttaccaaaatccccattaactctatttgcagcattctactgcttttgatttttctagcctgtgtctccaaactcttccaagttcatcccacaaactacttcaaaggctttaaaaaccgacctggtcagacttaacaatagcagtattcttggcatcagttttctgtattagttacttttacctcgttactaccagctgcttgacacagaatcttcatgtgagtattattggtttgttttgtagtttgagggtatccgtcccatcacggcagggaaggatgtaacagagctcacttttggagcctatcctagtcattgttctattgctatgaagagaagccatgaccagggcagctctctaagaaaaagcattaactgggggctaacttactggcggggagcatggcagcatgcgggcaggtgcggtgctagagaagtagctgagagctgcaggcagagggagactgggtgtggcatgagttttggatacctcagtgcctatcttccatgatgcaattcctccagcaaggccacacctactgtaataaggccacacctcctaatctttctcaaatagtaccactccctggtcaccaggcattcaaacatatgagcctatgggggccattcttttttaaaccaccacagtgtccaagtcaaaaaagtgaccgtaggaagaggcaagaagtggtcccaaaggacatgatcctatggaccaaccgcccccagttaggctccatttcctgcgtacagtcataagtccatcggaggatggatctgtctgtttggtcagggccctaattatcacctctagaaataccagcacagacaccacaggtctgtgtgctcctagcctaggctctcccagtccatccagtggacctctaacccatgtgtgggtacacacgtgcattcttttctggtgggcttggctccacagctctcggggcactttcctttgtcaccctttgcctgtggcttatcaggctgtggtgaggcttgctctctgacctgctccacgtccagagtctgctctacctgctccagctgtttatcttaagtagtgatctttttaaattatacatgttcccaagtccagagcagattcctagtttccagaatccctcatgagttaaaccctgcttattgtcgatttctgaatacatttaaaataaagattaaagtgaattaaatagtatttctttattaaacagaaatgtgtacttaatttttttttaatatactgaagatgtttcgtgccatgaagtctgtttctagccacatttcctgggtctgtcttcctattctgttttaacttcccttctaatttattttaagcttttctttaaaagtatatatttgaaaaaggaaaacaaattaaaaataagtctctctacatacacactcatgtgctcacacacaaacacacatagacacacacacacacacacacacacacacatatacacatttatattacatacctctgtatgaaaacttcccatgctagtagggattgaacttagagactcaggaaagataaccaagtgctcttcagcagactgacctctgtccccaacgagcttgttattcctgttttgagacagggtaccaccagcttacccagactggccttggactactctgtaccctaggcaagtcttgaacttacaatcctcctgcttgggcctcctgagccaccaggctctgtttaaggttttatcagagtttatacatacttattagttggctttagatttttttggaacacagggcataaacatctgtcgcataaaaaacgagtaatgcgttcagagtttctgtttgcacgtaaatctattatttagcaaacagtattaagaggaagctgcgtccagcaccatgctaagtgctcagttcctctttgtccctgcactcctagtcaaaagtttgcatgggaagcatgtcaggtcagctcaggattgaaatgggtcacctgttgccagcgcacttgcagtgtggcaggtctgctaaatgctgactgagattctttccttttccatagatctgtattaaagcagcgccagatgccaggctttccattagtgaaacacctctcatccaagacctgagcttaactgtggaaggggattaaggcattgtcttttctgccaacacagtcaatattccttttaagaacctcccatgatgttgaattgagacaagccagaattcagcaaagattaagacatcaactagaaatttatcttgaattttttaaaagtaattttttatggtttccttcctctcttcctccattcctccctccctcctttctcatcccaggcccctcccccatccactcctcctttgtttgtattcaggaaagggcaggactcccgtggatatcaacaaacatggcttgtcaggttgcagtaagagtcagcacctcagcttgtagtaaggctgggcaaggtgacccagtatatggaatagattcccaaaagcctggaagagtccgagacaattcctgcccccaccgttaggagtcccacagaagttttaaagacagggtctcgctatgtagaccaggctggccttgacctgtggcaaccctcctgtttcggtcatccaagtactgggtaacaggcacttaatttccttctaggtttgacctctacaaaggtcaaaccagctgagtaggtgcggtaagctgcatcttttcatatgatagccacatattctgcagagaattccgtggagaaaatacctcttcaccagatgtgtgtttcttcatttagaatgaagaatgtacttaacctgtgaacaaatgttttaactgaaccaactaccctgtttttcctttctcgataagtcacttcaagacctgctttgaaatgctgaaaacttgaatatagatgttttatgatgttacttcacatttggcctaaaaaatctttttctgtgtcataaacacttaattgaatacagagctcatctgagcagcgactttgactggtgacagcctgcagctgcttcctgtctgccatgagacttcccagccacactcttaactgctccagctatttaaactgtagtcggtgttttatttgccattacgtatttatgtcacatttacttaacagcgaagactgttagtgccacaggcaactagatgggcagacagactgatggaccttcttatggtctgcttctgagttgctgggggagtgtgcatacccacacatccggatgccatgtatggacagtaatgaagagagtacgctatttgtcagcagcgctcagagtggcttcatactccactctaattgctcgatggcggtctgcgttgtctttataggacagtaactactaatgctcgctttgtttgatgtgtgtgcatgtgtgtgtgttaaaaatgtgcatgcatgtgttacctgcctgttttaagagtcatttctcatgcactgtctgcctttttgtttgagacagcctctcactgccccaaatcccacagggatcataggtgtgtcctgttgttccaatgtgttcggtgggttccgggctctgagctcaggttgttccaatgtgtttggtgggttctgggctctgagctcaggttgttccaatgtgtttggtgggttctgggctccgagctcaggttgtcccaatgtgtttgttgggttccgggctctgagctcaggtgctcatgtttagggcttggattcttactgactgatgtatattctcagcctctaaggtacgtgttcaacaaacccaacatagcacccaccttaaaggaaaatgtttatgaatgtgctcacatctatatcattacattatcttttttcttctttgtattatatttatttatgggaggcagcaaatataccaaagctcatgtgtggaggccagaaaatttttttcaggactcagttctttgtttccaccatgtgtttcccagggatcgccaggcttggtgacaagcatctttaccctcttagccctctttctggcccctatattgtcttttgaaagtttatttcaattctgtaattagtaggtaaagcctattttttatttaaatgattttactgtgttttgtctctaataataaaatctaaattttgctggtttttttttttttttagaagaacctttgaaactattataatcaagactaaaccaaattcctctcatacccccttttcacgggaagttatttggaagggccatcttcactgggcagctacagctgtgtgagctataggccaggggagtactcaggcgtgtgtcctgttgtgtgtcccgaccccccctcccccgcctgggcctgcaatgagcactgactctgggcctctcttgtcaagggtcccacagtaagaatctctgtaccttcagaagctctttttgactcctgggactttgccctctttgctgtgggggaagcattcacaatgctttcctttgttcagtctttcccagaagttccaaacacttagatgtttgaccagagtgtagtgttcttagaggaaatgggaagagggtgtctaacagctaggggatactcacagttcagatgataggaagtggggtgtctaacagctgggggacgctcacagttcagatgataggaagtggggtgtctaacagctgggggacgctcacagttcagatgataggaagtggggtgtctaacagctgggggacgctcacagttcagatgataggaagtggggtgtctaacagctgggggacgctcacagttcagttgctgtgtcacagcttccagagcccccatgttttctgaagctgccagaggaacctggactctgagctttgacatttagatgctgcccgagaacagttgtcatacattatcgtgaggtacattacatgtcccactgtgactgtgtactctgctcttttctgtctaggtcgaactggaaggtacacccttatagaaaaatggagagacactgagagacacttggcaccacacgaaaaccccatcatatccttaaacaagtgggggcagtatgctagtgacgtacagctcattttgcgacggactgggccgtctctcagcgagcggcccacctcagacagcgtggcccggatccctgaaagaactttgtaccgacagagcctgccccccttagccaaactgcggcctcaggtggacaagtcgatgaaaaggagggagcctaaaagaaaatctctgaccttcacaggaggcgccaaagggctgatggacatttttggaaaaggtaaagaagctgagtttaggcagaaagtgttgagtaattgcaggtccacagcagaagagctaaggaggctgatccggctccagacagataagctgctggccatcgagcagcagctggagtccagtgagacagagatacggttctgggagcagaagtacaattccagtctggaagaggaaattgtccgcctcgagcaaaagatcaaaaggaatgatgtagagatcgaggaggaggagttttgggaaaatgaactacagatcgaacaagaaaatgagaagcagctgcaggaccagctggatgagatccggcagaaagtcacggactgcgacagcaagctgaaggactacctggcgcagatccagaagatggaaagtggtcttgaagcagagaagctacacctggaagttgaggaggcgcaggtcaacgaggaggagatgaaggggaagattgaaaaggtcaggggggagatggacctccaggggcagcagagcctgcggctggagaacggcatcagagcggtggagaggtctctggggcaggccaccaagcggctacaggtaaggaagggcccctgtctcagtgcgcaggacacctcatccgtgtaaggtggttctgtagctcgggcctgtctgtcgtagccttaggaaccttagacggagaatttcatgataatcttgctttcctcatgttataaaatagatattactagattcaactccagcatcttatcaaaactaagaacgctaactcttgtgaaccgaactaattttcaataggttataaagtatgtaagagggaaatttgtgaccaggtgagcaagattgtagtagtgctaagatgtatattaaactagtgatttttgatgacagattaagaacatacatttatttttatgagtatgtgtcgacatccagcagggaaccctcacgtaagccaagtgtgtcaaatgagtcctgacagtggccccatctgccaccccctcctctatagcaggctttgtcccacagaccacttacagcatggctggtgttttccaaccaggacaaggaacaggaactggagcagttgaccaaagagctgcgacaagtcaacctccagcagttcatccagcagacggggacaaaggtcaccgtgctgccagctgagcccactgaaatagaggcctcccaggcagacatagaaacaggtaaggccttcctttattctccttggtaagtcacctaaaatgacagccatcaaatgggtagcatttgggaaatctgttttcttggatggtcacatttttttttaaaactgcttctttacagacatgtttgccaaactataaatatgaatatggctatgttaactgcatcctggcaattctcctaattaattctcctgattcccgctcccttccaagtctttgctgtttatctgtcctggagttgaaacttctcctgtatgtactgttccctcagcaactgggaggaagcaacagggcaaagccctctggtctttgggaactggttcatagccacagctcttgtcttcttcttccttgatctttggggtgggaatttaacgagttttctggttatctggttcaccagaccactgtccatttcctgtttagagacaccattccagtctgggtccctgaagcgacctggctcatcgaggcagctccccagtaatcttcgtattctgcagaaccccatctcctctggatttaatcctgaaggcatctatgtatgacactgtcttcaggagaaggatccagccaaggtaccaaggacagtaaatccttcagtttgtgccaactgaacagggtctgttcccaagccactgtgtcctctcccgatcacaaaccacgtggagccctgtgcactgatgctgaacacggagcctgttcacacttcgcagtattgacatgttgtccagcagctgaaatgcaaagccttcgtttttatttgtagcattcagagagcattagaaaagtattaatctatgtttatacacgaataaaccctgcattgagagtaaagttatgtaactgtttagttaatttattccatgtaactgattgatgaatgaatgttgctgttaatattttattagtcctcatcctgtgacttacctgtgttaaatattgtgggttctgactgtgcatgttggcagactccgtccagctttgctcatgtacagctacacagcctcctgagggcttcactccagaccgactccaatggagctcgacgcacttaacactggcgcctctccccgcccctcctaggcgagataattcagctttctggtctggaagttaataatttctttacagtatttcccaacatgaattaccacagcatcacagaaatatcttcagtggggtaaatggttcatgtaaaatgcttatggtcatagactgctggctgcgcaactggaggcggtcctgggtttcctgacacactctgaggccttcctgcctcagcaccacctccgcctcccgtggatcctcgtggtgacagaatgtgagaaggagggatccccgaggatggcgttgctgtactttgggaatggtatgatggatttcagaacaacccacttctgtgtagtccatgcatgcatagcgggggaggtgctgcttgccatgatttaaaacatgggctgtgtgttttctctagtcactgagtcaaatgtagagaacactgcagtcaggtatttttttaccaaggaaataaaattaaattcagagtatgtttttatttttaagtttgactttataggatattagtctccatttatatttatatcattttgtgtattaagccaaaaaaaaagagtcaatgcttttctcatgaacagtgacttagctacattcacaagtgatttttagacgtgctgtcagacgccttgcagccctctgctttttctctgagtacatttggcacagtgtaactaagactttaatctgaaacttaaagtagttttcaattctaaagagaaaacattctctgtgttacttacatgcaataaaataaaagcggattgatacagcaatgccatggtaacaccgaaggcaactctgggtggttggccacacccagcttgcttttaagttaatgaatgtttaatggagctgagaatgctgctggatttaggtttccaaggagaagatttagtagatgcttctcaagaactgaaagccatgaatgttgcctcttacccacataaataaatagcagaccttaactgaaacactatctttgtgtcctaagacttaccaagtagatcttgccgttactgctttgcagcagttgacctgagagggaaccatggcctgcacacacttgccccagactggtaacaattgtttcatatctatgtgtatttaaaaatagtaatttgatgtcaaagtaacctatagctttttgtgacagtggtgactccatgtgcccagtacatgcctttctctcagtctctcctacacagagtcattctgttgttcggctaaattaacccttgatcacaaaggagaacattatacaaatggattgtcttctatttaaaccacagtgttaactgcaagtatgttaggctctatggtgagaaattaaagacaaagctggacatggtggctcatgactatgatcccagcactcaggagactgaggcagcagagttacataagatcctggctcttctaagttacatggaagttctagagtaaaaggggctagagtgcgagaccctgcctcaaaaaagaaagaacaggacctgcacggatccctggcagagcatcacatcgcacagctcacacggttgttaggaactgccaggtttgactagaaactctaaagcaggcgacacacgccaccagctctccgcagtcctggctctccaccagtgtcacacttaacatccctaacaacctcagaactctgaagctgccggctaccctcctaattactcacacaagcacggcctcccagatgggcggggtgcggccatgtgatttcacaaacaggctctgcagttgtctttgtcaccagttaagggacttctgcaagcacacctctgtttacctattatgactacaaatgaattggtttacaagccccgtctttcgccacatctcagcagagaggtgcaggcaatgggattcaaaaaataccaaatgggggataagtatccaggttctaaataataaattaggtcacaaatttttgtgtctttttaactagtactgaagttatattatgcggtttttctacaggtattaaatatattacaagttttattcttaccaatgaataatttgaatatcattggcctgtctgacctctaggtcatcatcattctcagagactcacccacagcgggttacctcagtggtgtgtgtgtgtgtgtgtgtgtgtgtgtgtgtgtgtgtgttttattttctcacttcctttatattttggctgttaacgtcccttttttgtctccgtgaacaggaaagtttttatgtgaggcttcagttggtgttgaagttgccctctgaaggcccagttagttattgaggggcagctcagtagctcctctagttgaaatcaggttgcaccccggcatgtacagtaaagacacagctcatgtatgacatgtggagtgtggtggcacagacagacagatcagcactgctcccacagccatgccctgtgtaacacatcgtttgtaagggcagagtggtccttggagacaagaactcttgtatcagggaatacctttccaagttaggaggacttcaacagattgaggaaataatatggaaaaagacaaggacaagcacctgacttcaggcatgcacagagacagacagtgttggacattgccttcgacagattaggcgcatatatgtattaaatgatgctctgtatccctctgtaatacaagcctgtcttgattagtccataccacactgtggtgatgctaccttagaagtattccttttgtatcatgtcagtgtttttaagttgcgtgttcgtactgtcttatagtgatatccacctccatacctgtaacactgaccacgtccaaaaggcgtgttccaggagaaggctgtcagctgtgtcaagaattcatggccatcagtatttatttagtattgctgcttcacgtttccctagtgcaccttgaacgccaggtcagtggctgcatcaaagctgtgggagatctttcacgtgcatttttttaaaatatatttttagaaaccaaatggctgcagatggctatttagcatactgttaaaccagcagaactctaaaggcaataaatgtatgcatatgtgttggggggtggggagagtgaaaatacaggtttacagccagacagggtgatagcccttcagtgcatttctcagtgtctcatcactgaccaagaaggatttgagttgctgcagctttagacagaaagtgtccatgttcactgactgtgggccataaatatgcttttagtatcgctttgctgatgtataaataagaaatctgtaatatgtattatatgtaattattttcttttgacttcatttcaaaatgtatattttctgattattatcatgagctataaagcgaaagatcaatatctgatattctcccaaataataaattttcaagactcattggggcagtacaattgttgttttctttcttataacacttaatacttcaagatataattttgtttcctttgaaagatggcaaagaaagtaggtctgtgtatcagtgatttaaaaatgacattgttttctaaatgcagttgttaacatgaagaattatgtattgctcagaaggtagcaactaggctggggagatgcctcataggaaaagtgcatgctgcacaacatgagagagacctgagttcagctccccagcacccatgtgacacgtggcacataccagtgctcagtgctaaggatcaaagacaagtggaccactgggctcattagccagccaaccacgctgaaacaggaagttccaagttcagtgggcgacccttggcacacctaagatggtgattgagaatagtacctgcagttgacctctgacctccccacagaagcgtgcacctgcacatggatgtgcacatgtgcacacactgcactcacacacccacacacacccacacacaccccacaataaataagaaaaagtagctgtttcattagagtagaacttataagaaactaatgcacccccccgccccacttatttcaaacatgaaaattagaaacttgccagcttgtattcctagatctcttaaaagctgtgtgagacagctttaatatgtgaacatgaactctgcagtacctggtggggggagggagagtgcagtgcagcctgagtaaaaactcctgtcatagtcagcccaggaactactgtgaataagcagctgctccccttgaaattcagatcttccagcacccagagcactttcctgtgtccctggcaacattgctggagctcacaggacagcatctgatgtgcaatgtgtccatctttgcaggaatattttataagtagaggctaaacccaagttaaggaaatgcgagtgcataatgccagaacggtcactgtaaacgcgactcctccctggctgcttacgctcttcgtgcagggcaccttaggagatgccaggagagtattgagtggactgaatctggcatggcttccccgcctggaggagagcactctctcacgacgtgaccaactcactccacatgcttacttcaattcaaggggtaaggggtagactagactgccatggaaccatggtggaagggcttccccagcagcccaagcaccaaaggacacctgagaaggtgacaggaagcagaagggcctctggcacaggctggggctagatggtgatgggcagaagggaatagagagcagacagacatggccgtgaaaggccctggttaccgcataaggagtttggatatggaatgcattagaggttcatatgttacactttgtcctgttttagaagattgtaacacctttggaacatagggcctagctggaagaaacaggtactggggccaggcctggagggcacagcactacacccactgacttctggcttcttggttcactgggattggagctgtcgtctgctttatgctccgaccgccacagagccacccaccacatgctctctcctccatgacgaactgcagcccctcaaactgtgagcctgggcctcagtaaacccttccttaagtaacaagtgcaggctgcatcctggctgtcattgacacttggagcatggaaatggcatgatcagattattatgtaaggaagacacttctggctaccaatgtggagtcatgtaacaaggcaccatgtaagaaacctagaagaactggccaaaggggggccagctaaggaaggcgccatggaggcttacatattaaaagggctctagagaacacccatttggtaccagaaattcagcagaggctggatggagcaactctcctaagcaaaggctcgtgggcacttctctgtgagtgacgtgagtggggcttcagacagaaggctaggcatattcttgagtctgttttagggatggcaaagtcacacataaaggcacttgtcaccaagctggacaacctgcattcaatcccaggaatccacatggtgggaggagagaactgactctttggatttccacatgtgtgtcatggcatgtgtcctcttgctcccatacaaaagaaatgtaagagtaatttttaggaaagaaaacatgctgtgtagaaagcagtctgttggcacctagtcatcccagtgtagcacagcagtcctactgtgtgagcatcatagaaagtcccagaacaatccaggctatagagtgagaccctgctttgatatacatggatgggtggatgatagattgatagaaagatagattgatagatagatagattgatagatagacagatgatagatgatagacagacagatgatagatagatagatagatgatagatagatgattgatagatatgatagacagatgatagatagacagatgataggtagacatgatagatagacagataatagatagacagatagatgattgatagatgatagatagatagacagatgacagatagatgatagtcagacagatagatggtagacagacagatgatagatagataaatgatagatgatagacatatagatagatagatgatatattagatagacagacagatgatagatagatgatagatagagagatgatagacagacagacagatagatggtagatagatgatagacagatgatagatagacagacagacagatagacagatagatagatcaaccagttaggtaggtagctacatgataggtaggtaatcttaactcttcatttaataaaagtagaaactgaggcccagagaaaatgtcagatggctcttatgaaacaggtgcaataaagcagccaatttaaaaaatttaattgtatgtatataagtgttgtgcctgcatgtatgtaggcatgtgtgtgcctggtgcccacagacaccagagagggaactagatcccctagaacaggaattaaggatggttgtgagctgccatgtgattctgggaactgaacctgagtcctctggaagagcagccagtgcttctgatgacaggaaaagaagacttgttggaaggagagggtgacaatgaataatttaaaatttaattaaaaagtctgtaagagtctacagacccaggttctcatgtcatctctgttccataagagctgcacaacaccacactggcaataattttctctggactgtggtttctacttttattaaatgaagtcaagattatttatttttaaatttatttattatttatgaaaggtttcactttatagtccactgtggcccatgctggcttcaaactcagtcttccaagtgctaggattgcgggtgcgtgcctccaggccaacttatttctgtcccttccagacctagcacaaaatggttttatacagaagacaagcagaagatgaggaaaacaaaaaccaaaacaaaaacatgaagttaaagaacagaggcctggtagatgtcggtccccaaagctacagacaagcagcagccggggaacagaacaaacagctagcctgaaagaagaagggtatctacccccacagcacccgctgaggaagggcttccgtctgtggctggatggagcatcccctagtctctgccatcacaccaccctgcagaatcacacggtcaggaagccgcctgtcactcccaaaggcccagcttgcaagcagtgggcactatgccccaatgctataccaaccccactaactttctaaaatgtactcatgtcttccctcctctgcttcagattaggtccaaccatcataagcaagtggtatcctctgtcttcttccatgcttggtcacaacctggccatgaattgcctgttcctttgacatccatcatccccacagggcagacactagggtgggcttcacgctgctttccttcccgttgccaggcactggttatacgtgtgcctccaagagatgtacgttgtattaaaaggcagatgtttgggtactgtctgctgcacatgagaaaatgagtcaggtcagaccacttgagcatgtggttctcagtggttccacagcacactccatgtctcctggtgatagctttgttggaagagggtgcaaggagatgcagcacagagacgagcagacgggccgggccctttgcacccacatgcctggtacacttcgtttccggtatccactcacctcacctacttgcaagcagtctcctgtctacagaaggcccggcttggcgtgtgatcccatggccttgcttcttcacagggaggaccgggagccagtgtattcaagcgtctgacttctctccttttacctacttcttatctgacacaaatgtcagacacagccactcaggttggagatgggtgagtgtatttctcaggagactcacttcgtaaccagctctcattcctaatctgggcttccatctttggcccagatacatgggagatacagtctgcacctccagcataaattaagaagaacagataatcttgtccaaataagtcttcatttcttcttctcttccacatgacagcatcggtacaaactgccagatgctggcttagtcctttgtgagtttccttatttgttttgtttaccacaactcggggtatgtacacccccgatagcctctcctcaacctgtcaactgtagaagctccagactgctgtcacacagagcgtgtgtagaaagagctgggacttggtctgtgtgaggctctcaggagaggcagacaagtcccttctagatcttcaaccactacaatagagtctattcaacagagctgctttctgagacttcgcactgcagggtgtcgctgcctggtcatctgatgccctctgcaggaagggtctgctttggctgttttggatccagaggtcctcaaggttgtgtattctctcggtcttcatggaaccaacactccatcctgtggctctgaaaatagtatccgtatttgtagccaactcggtggggctgaagttattcgaaagatgcacttgtgcccttgctttggctactggactactgaaacagtggaccccaagaaattagaactccccaggattctcaagatgggagaagagaaagcctagaccctgggccagcctgaggggaaacttcacagttggttagtctgccttacagaaacgggaatagtggatcagaggtggtggcaccacagtgaccagggctgcttgtatgtgcatgaactgctcccctgtttaaaacccaacctcaaatcaagaccctggtgatgggcttggggtagggaaccaatgaatgcctcttcccattggagactttccctttttctgctgttctaattggtttactgagaactaacagctgaacctggctgtctccctaagtccaggaacataattacccactgatccccactatcttaaaatctaagatttgtcttcatgctctaaatttcacttaaaaatgtttcttaaatttacacgaagaatcatactgggagacattcctctatggatgtacgtattctaatttcaatttacttatcttcaaaaatccttcctgtatccaacgtgttgccatcttgacttttctttattctgaatctgtaacccaagtctatttttacttaatcatcctgagagaaatgttggaccttgacaggaacctacctgtgcacatacgtccacatacatgaacacatacaagggctctctctctctctctctctctctctctctctctctctctctcacacacacacacacacacacacacacatgcacagacacaagggttcacacacacatatacatgcccacaaccaacatgcatacacaaacacacacacacacacacacacacacacacacacacacacacacacccatgaagatggcaaaagaaaatgagatggataaatctggggtgcgaatgacacgagggtctaggctgacttctgctgttgacatgacctttggcatcgtcatccagtgaggactgtcccgggtctgaaaatgagcccccattctcactcctagggcctccacccctgttagtatgttaacatgtactactgtattgtgtgttctgatcacagctgtgactcattcttaaagactaaacactcattcagaaagatcaatacattgcaaatgcctcaattatttttattatttcctctatttcccattcttttgttagcaagaatccctgggtgattcaagaactcagtgcctgcagtagccaacaatcttacactagggggcagcagctaccgtcagtcaattggcctaggctacaaagcctggctggtgaaccggtctgagcgaggaaggcctcactcacacaaaggtactctttgcaccaatcctccctgttgttgttttggaaaaagaaaggtctgcttactctaaggacttaagccaatcctttgccaacatagcaggggcacgttttatcagctgtgtgtcacagttctcctctgacatgacgaagtgacatttggtgggatcttttaaaattagtgttttagtatggtcttgtagtaatgggtgagttttacctctgtgagtttgaccagagggagttaaaccatgctgccggggccactagaatcaggagcaaacaggtctgtgtttacaaagagtaaagggttcagagggaggcttgccaggttgagcacggcagacccagactgtcagggagcacggaaggatcagaatgtcacagcagagtgtttgcaaaggcaggtgtattcgtgacttctctggccacagggacaagtacctggcaagagctaacatggaaggaacggtttgcttttgtttgtggtttgggcgtctatcgtggtggggtaggcctggtggcaggagcatgaggcagccagtcgcacggcatctgaagcaggaagcccagagaggtgaacactggtgctcagctcactttctcttttttagggtctaggacccagcccgggcatgatgttgcctgtgatggaggtgggtctttctagtttaaccaattcagaaaatcccttaacagacacacccagagttttgtctcctagagactgttgagatgacaacagtaaccctgtgatcagtgggtatatttacaaaggtacaaagggagcagcaccacctggtgcctgcgtgttctcaaagacagcataggatattgtatccacgagttccaacgaaattttccaactaagaatattacagaaagtagattaaagctccacaaaacagtgccctgtccttctgaacccagactgtttgacaagattcagtacagagtgtctttctatacaagttagtggctctcagctagagcagttctaccagctaggggacatgagaaaatccccatgtctttggtggccccaataattagaggcagtgattctctttaatgtggtagagggataactcatgacaagaaaactgtagtgcaatttttaaagtaggccaaggtctcaattttcaaaccatgcaaatagccagattgatgaaaagaaaatgctcagggttgccaaatgaaaatcacagcgagctagcgcctcacgtagtagaatgacttctgtggacaaaagacggaagtaacattagagtgtggagaatgggagaatgtaaagcagtactgcatcctgggaaacagtggaactacctaatgacccggcactcctctcctgggtatccgccaaataatgagctccattatgacaaaagggtagccacactcatgcccactgcaacatgctcacagcagatcagtggagttacacacacacacacacacacacacacacacacacacacacacacacgtgcacatgcacacccatacacacacgaaggcatattatcctgctccaaaaaggaagaaatttgtaacaaaacaaatgaacctgaaagacattatactaaatcaccttcatcatccagacacagaaacactccatattctcatctaggaggggtgtgtgtgcgcacgcattcatgcatgcatgcaggagctcacatgagtgcgtgtgtggtcaagttctggacttagatggtcgctgggaggaagcagagtggagcggggaagaggtgctggtttgggccagaattaagtaaaaaacattattttgtgtgtgtggaatggtcttgacatcacagcccagcagggcagccagagtaaaacagctagggcagtgtctcactgcaaataagccctgatgttatagggcaatggataagttattagttgatgttatcattccatgtcattcacataccacagagtatcccatcaccctacaaacgtggcatgcaaagatttgtcaatcagaatatgactgacttacaaacacagagggagtaggttatgttaagcgtctatgctacacggaacagaccccaaaatgaagagttatcatctgggtatgtggcacttacccattatctcagcaagcaagaggaatcgggagttgaatactagcctgggctacgtgggaccctcactcaaaaaaaaaaaaaaaaaaaaaagagagggagaagagaaaattattgtcccaagtctctccctgcttttagaacctccctctactctctatgtaatcacaaagtgtttttagcacagctttaatataattgagacaggtgagttgaggagagtgctggttattgacgtcacacgatcaggttgttagctctcacatgctcacaggtaccctaccaccaggctgcatcccccatccttggatttgggggacaatgtcacactctgtattgtgggtaggttcagacccgtggtcatcttcctgcctcagcctctgagtgctgatattcccagtgtgttccacgatgccaggtgagctgttaagtgtctttgacgtttctgtgggactgagtcgtcagggtcagctctgagctctgggttcctggcggttgtcagtgagtagacatgtcaccacacctttctagctgtctcttggagcagcgactgtcaatgaggttcctgggtttgttaaactctaacattttctcattgtcaccttcggggagtgtcactgtgatttgtgtttaacgtgttcactttcttgttttgtttctgtttttgagacagggtttctctgtgtagctctggctgtcctggaacttgctctgtagaccaaactggccttgaactcggatcaccttcctctgcctcccgagtgctggggttaaaggcattcttcaccaccacctggcgtctgttcacttctatacttagatctctttcttccctcttatttattctttatttgtggtttctttttggtcttttatttgttttagtctgtggtgttgggaagatggaactcagggatttcttgatgcttggcaagtgctttccatagagctatgtccccagatttcttatgtttgatttttgagaaaggatctcactgaactgcccaggttggccttgaactcactgcagcccatgtaggccctgaagtcctgcctcagcctcctaggtagattggatgaccatcctgcatcaccaagcctggcccagctttctgctttttatgaagttctagggaaacaacctaaggccttgtgtacaccatggagccatatctgcccctttcctacgtatttaaattaaaaggaatatatatttaaattatatgttatagaatcaattttctatggatttctatgtttctggctagtaaagtactagaacaaaatatttgttatataaaagggatatttgatctcataggtttgagagatgcaactgtagaaatcccctcctgtataaactcctgatcactgcacccagccaggaaatagcaataagaaataattactaagccgggcatcatggcccacacctttaatcccagcactgattcaggaggtagaggcaggaggatctctgtgagtctgagaccagcctggtctacttaggaaattctaggccagccagggctacatagtgagatcctgttttaaaacagcaagggcagaagtggtcactattctctgtcaggtgggaaggcgtggctgtaaagacttacttcgtcagttcattgaacgtgcgtgttacttactctgagcatcgctcagcacagagcaagagacgcaggcaggcaattgtagttagaacatcttttttggtaccagaaacatgaacagcatttgtcataatcagcacccaaacctgagaggacagccttgacctctctgcttcctcggaggacccacctcatgcccttgacgtccaagggtacaagggacaagtctgtactgagtggtttttgtgtgtcaacttgacacaagcttgagtcatcagaggaaggagcctcagctgaggaaatgcctccatgaactccagctgtaaggcattttctcacctgagttcagctccccagcacccatgtgacacgtggcacataccagtgctcagtgctaaggatcaaagacaagtggaccactgggctcattagccagccaaccacgctgaaacaggaagttccaagttcagtgggcgacccttggcacacctaagatggtgattgagaatagtacctgcagttgacctctgacctccccacagaagcgtgcacctgcacatggatgtgcacatgtgcacacactgcactcacacacccacacacacccacacacaccccacaataaataagaaaaagtagctgtttcattagagtagaacttataagaaactaatgcacccccccgccccacttatttcaaacatgaaaattagaaacttgccagcttgtattcctagatctcttaaaagctgtgtgagacagctttaatatgtgaacatgaactctgcagtacctggtggggggagggagagtgcagtgcagcctgagtaaaaactcctgtcatagtcagcccaggaactactgtgaataagcagctgctccccttgaaattcagattaggaaattctaggccagccagggctacatagtgagatcctgttttaaaacagcaagggcagaagtggtcactattctctgtcaggtgggaaggcgtggctgtaaagacttacttcgtcagttcattgaacgtgcgtgttacttactctgagcatcgctcagcacagagcaagagacgcaggcaggcaattgtagttagaacatcttttttggtaccagaaacatgaacagcatttgtcataatcagcacccaaacctgagaggacagccttgacctctctgcttcctcggaggacccacctcatgcccttgacgtccaagggtacaagggacaagtctgtactgagtggtttttgtgtgtcaacttgacacaagcttgagtcatcagaggaaggagcctcagctgaggaaatgcctccatgaactccagctgtaaggcattttctcgttcagcaattgacgggggagggcccagcccatggtgggtggtgccatccctgggctgctggtcccaggttctaacaagaaggtggactgagcaaaccgtgggaagcaaagccagtgagcagctcccctccatgacctctgcgtcagctctgcctccaggttcctgccctgttttgtgttcctgtcctgacttccttcagtgatgaacagcaatgctgaagtgtgagccaaataaaccctttcctccccaacttgcttttgaatcatggtgtttcgttgcaataatggaaaccctaaacaggacacagtccaaacatagtttagccctgtagaactgacacgtccctaattgagttgtcatttgggagctctccatagaaaaagcgaagattggtgtggacttccgacctcagtgtctgttagtcacagcacactgaatttcccgaagacatgctgagtgacctcacactgggtgagccacttcctgatagacggttactgacctgatacagcctgagtctctagacccacaggcgagacctggctagatggagagataccaagaagacttgtgcaacagtcaggtgagggtgcaagtgggggctaaggcttaaaggctgggcgcaacacaaggaagagcaggaatctggggtcatcattgtcagagaaagggatgtcactcctccatgctaataaaagtccacttcccaccatgctcatgactaacgaactcaccaggaagacacgccagtatagttcccatgtgtcatttaatcctggccactaccttcagagagaggatcgtcctctttacaaacataaatacagagaagtcacccagccaagggcacacacctacagtgagacttgaaccaggcggtcacacagaccagcacacagggcctctgccctcctttacagccccagctttaccattctcaaagctgagaagccacgttattctaaggctcatcggtctgccctcaccactgtccctataaactggcaggcaagaggcttccacaagctgacagaagtggctggaggagacggagtttgtgatgcaggatttactggagtatcaaacagcagaggggtgagctatacggagcacaaggggtaaggaggcggagttctgaggtccagtccttagcctgcatggcttcccctgcccagacatgcacagtctgtgtggaaagcagcttccgtccatgttttgacaagacagggttacctagccaggaacttgcgtgtaggttcctgcttttgcagctctgtctagatggcatgagggttgggcaatcagaatgtcacttctcctgtgaagatgggcatcttggaataacacatttgaatttaaacggtgtctctggggtaccacatcagttacatgagaaaatcccctgatagttaatggaccctgtatctgtctaatacaccaagtgtcccaggaagagaccaaaacataagactggtctcccctctacagactgaatgcttgactcctcccccaaattcatatgtggaaatctgacccaaacaaatgtatttgttgatcgtggtgcctttgggttgagggttgagagtaatgggagagtttattagaagaggccagaaagctaacttgctgtcttctggcccatgagaagcccaaagcctggcccccagaagaggcctcaccaaaccccagccctgctggcactatgccttctgatctccaccttgtagaactttggggaagggatgtctggggtttcttggcccacagcctgaatgtggggagcgacgcttctgtcctctatcctgtaatcaattgcttcctgtagacctgaggtggtctaaagatggcagggtttcggaatccgaggagactgaagtcaggtaagaaaggaaacagtggctggaaagacggctcagaaatagtctaccactcaggcaagccccatgtaaaagctgacatggcggtcagtgtagacaggatatcagaccaattaagaactccatttacaggtcagtgctgagggctggagaatggagcctggtggctccctgaaggtctttggccagtcagtctaggcagatcagtgagaccctgtccccaccccaaataaagatggagagattcccaagaaaaacagttgatgagctctgacctccacgtgcacacatacatatacacactcaacatgattttgtgcatatactacatagtgaacacaccaggcacagacacacatacacacacacacacacacacacacacacacacagagagagagagagagagagagagaaagagagagagagagagaagaagaagaagaagaagaagaagaagaagaaggaaatgccctacagagacctctgctaatgtccactcctctgaggaccttgagaccctgtggcagggtcacagcctgactggaggaggcagtgtctgcagcctctcagagcccacagcggctacatgaagaagagggtttctgggatctgtcacttcacagctactctgccacattcctttggcaaggtgcacacccaagcacactcatccccacacaagcatattcacacacacgatgcatactcacacacaagcacactcacatacaagcacactcacacacaagcatattcacacacacaatgcatactcacacacaagcacactcacacactagcacactcacacacatgcacactcacacactagcacactcacacactagcacactcacacacaagcacactcatacactagcacactcacacactagcacacttacacactcacacacaagcacactcacacacaagcacactcacacacacacaagcacacacacttgtcttaaacactgaattttaggtgctaagaaagaaccatggatatccaagttgatgttttttagccaggatgaaatagcccagttattgggcattaatacaatttcaaaacaggaacactaagtgtgaggccatcagaagtgtttcaggtctagctgtcgggatgtaactgaaaagtagccattggagatgctcttcttacccgtcacgcccggtctgtgctctctgggcaagctgtgcccaggctccccactatgggagcagaacagggcctccatgagcaacatggccacgagttgatcttcactgttaacatggcagggttaggatcacagaagcagacatcgtgtatgtgaaggtgtctcaggaaatatttacctgagggagaaccactctgcctgttgacagcaccaccccatggactggggtccaggacgaaacaagaaggagggggaaagcattcatttctgcttcctgactgtgggtgcaatggacaagctgtccctccctgccaccacggcttccctgtcacccaactgtgatccaagttaaacccacccctgtttgcacacgcccagtgtgaactcgtggaggtcaagagggaaccagttttctcattctgacacatgggtcctgggaatcaaatgaagtctctttcttttttaagtaaaaaacattattttgtgtgtgtgggggcggtattttggctgcatttccggctgtgtttcatggaaatgcctatggaagtcagaagagggcatagaatgccctggagctggagttagatagtaacgcacctccacatgggtgctgggacttgaacctgggttgtctggaagagcagccagcgcttgtaaccactgagccgtctctccggcaggaactcaggttcataagctgtgcagcaagcctttagctgcatttcactggccccaatgctcaagcagccagggtcttggcaagcttcctatcaggtcctggaactagctcctgaaggttgggtaacgtggggatatgtataggtctgccaagggtatggggttgaccttttagttgtagcaaccaagctacacgtgcttgagatggaccacggggcccagtggggtgcggtgaaggcagtgggacaaacctctaaccctcagcaggtagaaactcaaggcggccaccttcctcccagcgagggtctgacactgccatctacaaaggaaaccattccctcttgctgcctccatgtctactccctggaatctattgtgccaagtttatgatatatttgggtctccccactgcgctttggacatgggacattctagacatgttccaacttatacatgttctctgagctggagnnnnnnnnnnnnnnnnnnnnnnnnnnnnnnnnnnnnnnnnnnnnnnnnnnnnnnnnnnnnnnnnnnnnnnnnnnnnnnnnnnnnnnnnnnnnnnnnnnnnnnnnnnnnnnnnnnngtgtgtgtgtgtgtgtgtgtgtgtgtgtgtgtgtgtaagacagcagaggctcagaatgagtcatgtcaagatgaccgtcctccgcattcctctctaaggcctgggggaggactggtttcctactcgccccttgtctgtgagatttagcccttggccttgggacagaggtctccgccggtcagctgaaggctgtttgggtttcccggcgattcttacaatcttagcatccaccgccttcccccatcttcaacactagcaacagcaaatgaacccttccacacttcagagctctccagatcccttctcttccctctcactgtccaggaaaggtcacccatccttaggactcgggggatctgggcatggacgcatatgcctgtatgctcagcacccaagccacaaggccaaaggcaaaggatgtgactttgaggccagcctgaggtactggggggtcaagactacatctatgttatcctgtctcagaaaaaagtaaagatgaagaaaagacaagggcttgtgtgataaatttgggggtgccagatagtccctaatcaccccacctcacacctagtggccagaacatgtacatggggggcactgataacatcaaatatcatgacaagtgcccacactggaggtatcgattctaaaatcaactgtcagttccagagttacccagagaagaaagtttttaaatagttgatgtctctctctctctctctctctctctctctctctctctctctctctctgtgtgtgtgtgtgtgtgtgtgtgtgtgtgtgtgtgtgtgagacagcagaggctcagaatgagtcatgtcaagatgaccgtcctccgcattcctctctaaggcctgggggaggactggtttcctactcgccccttgtctgtgagatttagcccttggccttgggacagaggtctccgccggtcagctgaaggctgtttgggtttcccggcgattcttacaatcttagcatccaccgccttcccccatcttcaacactagcaacagcaaatgaacccttccacacttcagagctctccagatcccttctcttccctctcactgtccaggaaaggtcacccatccttaggactcgggggatctgggcatggacgcatatgcctgtatgctcagcacccaagccacaaggccaaaggcaaaggatgtgactttgaggccagcctgaggtactggggggtcaagactacatctatgttatcctgtctcagaaaaaagtaaagatgaagaaaagacaagggcttgtgtgataaatttgggggtgccagatagtccctaatcaccccacctcacacctagtggccagaacatgtacatggggggcactgataacatcaaatatcatgacaagtgcccacactggaggtatcgattctaaaatcaactgtcagttccagagttacccagagaagaaagtttttaaatagttgatgtctctctctctctctctctctctctctctctctctctctctctctctctctctctctccagttgtcagtgtatgtcctaaattgtcctaaatgccagagaaacgtgttgtccttcaaggtgtcaggtgtgtctgggtcatgagcccctgatgcccacagttgttgagaagaggagctgggtcatgaacccatgacattttctcttggtcagagctgactggaagggggaaaggctttttacccaaaggctatttgtgatgggtttggggtgtcaacttgccacagcctaaaattgcctgggaagagagcctccacaagggatcgcccaggcaggctggtcagcaggcttctctgtgtggagtttgttctgactgctgatgtaggaggacaagggcagcacatcccctatgcaggggtgctgacccgagtaagacgagagagaacagcaggcatcatgggtgagcttgatgccctctgctcgtgactggacgtgctgtgacgcgatgcttaagtccctgtctcaatgtcccttcaccctgaaactgaaagctgagacaagctccttcctcttggaatttgtctttgtcggggcgtttgtcacagaggtagaagtgaatggagaatgccaactcaccagcgattctttgctgagatgaaacaaattaaatgtttttcagaatcgcttactgggttccaggcctagggcagctccttccttcccttgactgcacagcagtttccagtatgggtgagggatcccagcactattttaattcttcgtgacaggaatcgcatgtgtgttcgtgaaatgtgtctaggtgccttgcatgtcaagtgacaagtctctaaatgtggcatctagccacactagcatttatgtttcgtgctactcatgaaacccttctacagacgactttgaatcatgaaattagagtaaaatcttaaaacatgctaatttcacttccctggagatagacaatacttttgaggtagaaacaaaaggaaatggccatatttatccaacttggaagggtacataaaaaaaaagtacaagaaggacatacatcagttctggaagatgctgttgttgcttcttggtttttgtttgtttgttttgaggccgggtctcctgtacccaggctggcctgcaactccatagcatcctaagatgactctgaggtttgcaccctcctgtctcctgggttctggggttacaagcatgtaccacacactcagtttttcgcagtgctggatttaacccaggtcttcagcatattaggtgtaatggctgaccttggttgtcaacctgacatacttggggaggggggatttctgttgaggaattcatcccatcacattggcccatgggcatgtctgtgggacataactgactttattattttatgtgtgtaagtgttttcctgcacatgtagctgtgccctacctgcaagcttggcaccacggaggccagaagagggcacctgacggtggaactgcagttacagatgtttgtgagctgccgtgtgggtgctaatctgtgtgtcctggaagaacagccagtgatctgtctctccagccaatcccccctgcccctagtacattttcttgatcattaattgatacaggagggaccaccttgggcagtgccatccttggttaggtgagcctggactgtgtaagaaaggcagctgaagaagccagaggaagcaagccagtttgagcagcatttctcctgggcctctgcctcaattcctgcatccaggttcctgcccccgctgtccatgatgatggcctgtaccgtgtacgctgaaatgaacccttttctccccaagttggttttggctaagtctttaattacagcaaccaagagcaggctagggcattaagcaagcactgtattaagtcacgttcctaacccacgtgcaacattggttcttaatttgggttaagaatttgagagggcaaaatatggtggtgaaatgtccttcttgcacaatccactgtgtgcctgaaatccatatgatttaccacaggcgatgctgaccttgagcacacagctatggtggagcttgcccggcctctccacagtaaagttgctctctttctcttcctatactctttggaagggagtccctcaaggggattgttctagttgtgggttgtttttgttttttctgtttctttctttttttcttgcacaaacctagacctatgaaggaagaggaaacctacctcagctgagaaaacacttccatcacgcaagtctgtgggacattttaagattaattattggtgtggtagggcccagcccactgtgggtggtcctgagttcagaaagcaaactgagcaagccatggggaacaagccagtgagcagcactcctccatggcctctgcatcagctcctgccccgacttccctccgtgatggaatgtcaccggagagctgaaagctgaaagaacccttttctttcccaagttgcttttggtcatggtgttttgtcaaagcaatagaaactttaactaagagagatgctttgttcactctttggtgtaaaatcttttcagtgagaacagcacacttcagaagtatactcatgtacacttcctctagactcaaaatggtactttccgatatctgttatatcgtcctctttcttgtgtactttatagaaacattctatatatagttatatttaagtagggttgctatttgtgctaacactttgtctgggcctttgaaagccagttgataatgatttaccccgaatacttcatcatcaatagcccaagaattctctcacagccataacaagatgatcaatttcaggaaatttaacgttaatatcacctctgtgttggaatccctggggctggccctctttccttacccataaagctggacagactacctaaggcaagtgtcacactggagaaaaagcaaaaccctactgtgttcccaaagacttggaaaccaaagaggtgagcctcatgacaaacctggctccctgcccagaggacttttgtgacttcttggtggccatccacaacccaagcagagtgagacattccctgcaggcccgggaggagaccagcggctttgcaaggcaaagccctggagatctggagctgtcagggcacagggatccccagaatgtggtccacttccccttacccccacttaatctaagcttccttttagaaattcagtttgagagcaggctagcaaggtcatttccagagtcaactttagggtgtcaagaacagggacatggagagagaatcaatagttagaagctaggagaaatgagggtgtagaagtcccctaaataccagcctcctgggtgagaaagtgccccaaccacaaacagacaagagcctgtttactaagtcctcatcactgtgtggtttcagcaatgctggtagtttatttttaaagggactcatgaggctagaattgtggttctagtaggtagaacgcttgtctcactcacacaaggctctgatacccagccctgcttaaaccaggtgtggtggtgcaggcctctaatcccagcagaggcccagcaggatggctggaaatgcaaggtgggaaccagcctaggctacccaagattatctctatagcctggatctctaattaccccttaaaacagtttcttcactcctgagttgaatccatttttgtgtggtttcccttgattcagcaattctcagctagctgcatattggaaagatctagagccctgtgagcattgatttaggccagctcagtcggatgttccgagggcagaagcctcatcatcaaagaaaaagccctcaagcaacgctgatgtacgaatgtacaaggtctccaggacctctcagggctcttggctcagaggttgtgtggtccagtctgggaactgggtgtgggggtggggtgggggtggaggtctagaggctgagcactgggcactgggcactgggagaagggtgctgagtgctgattgctgggtgctgcagtaagaggtcacaacagagttccaagaagtagctggaattagaaaaggctttagtgtgtctccctccctccctccttccctccttccttccctcgctctttttcttttctgtgtgtggtactgtggattaaccttgggcctggcataccctacaagctacataagctctggaccactggcctgcatctccagaccttcctgtactctttatttggggacagcatccctcagccttcccaggctgaccttaaactagtccaggcagagcctgagggtggctactgccccagcctctagagtagctgggaccaccaggttgtgcctctgggcttagtttgcttctgtactttccagttccagagtgttcactgaaacaaatttgcaactctttggatttattttcttaattacatcctaattttctttccctgagaacattgaacttgagagctggtgtttcttaagcttttctaggcaccaaaaccatctgtcctctggtccaggtgcagactatgactcaacagggttcacaattactgaagcatctcttagctgctccagcaacagcagagcagctggctcacagcacacttccagtagcatccgctcaaacctcgcctgtgacctctgccccctgtcccccccacccagtcactgcttctctttaggggggctcccttcttactcctacaacacacacaaaaagtctcttcttagcttccaacttcagagcttctaagtcacatgtattaacaaggggaatggttacttctacttgacataacctagaacctagagagtctcggtgaggtgctgcctagatcaggttggcccctgggcttgtctgtaaatgactgtcttgattgcaaggcggctaggggtgatggaggttgtctagtgctttggcaagtatgttccctggcataaccatgagaaaagtctgagagtggggttaagcatatgtacaatgtatgataacttacatggatttgaagtatcatcaaaacatttttggaaatctttagaggggaaaaaagaacagaaaaataaatacctagaaatgcacagagaataagagaccttggtctttgtctatcaacagtgtagtcccgagtcagagggacagagcacaattgggtaccttagccatggaggttcccccttgctctcctctgcaagttacagaaggtcaaccccagcctgggtaatcagagaggacacataggaggtgccctcacagctggaggccccccatctgaccaagagaaactccctggtctccagtggcattccctcctagcttatcacctccaaatttagcccacactcccatcagagggacggactccctgtaagaccaaggactccttgccagctgttgtctggggtctctagaaaaactagacaggcacagcctttagattttttccttaaaagggatttactcaaaatgtttattgggtgtgtctcctgccccagcagtggactagactccagggaccatggaggtccctcagagatggcgacagcatcagcatccagagacccacccagactaggcttgagcatggaggcttgatgcatgatgatttgtgtggatataagatatcaaaagatactttcagaaagctttagaggaaaaatgaacaggaaaaaaatatctagaaacacacaaagactaagagaccccccccccagtctgttttcgaatgtcagtggcaaaagggaggggttggctggagcacagtgggttgacctttccctttgcagctggagagagatatgaggattcagaggtggatgagcaatgaggggtgagggtggggaggtgtgcccagggcctgattctcaccaaggtgtggggtttcctaacagtgagagctgggagctaagcagaggtcttcaagtaagtgttgtgggggtggggggtgtctgggaggatcctagagaccctgagctggagctaagccaagagaaccagctgacggacagcagccagggacgagcacagactggacacctcgccaaccagcatgacattaccagggtggagacatgcacaattcatcacacatggcttggagtgtcaacgtgacaggagaatttagagtcgctaagtcctcattgcacgttcctgagacgcccgttcaagaatggcttccttcagggacatttggggttaagtacttaaatccccaggcgagtaccccgtttttctccttgaacgcagaggtcctccagctagccttctcctggcagaactgcgtgttcgcagccacgttttgtttgcagtgcagattctgaagtttgctaaaatagtgggtgacctgagaagtggatgcacacatggtctaaatctgaggctggctgggggaaaattacacggtctcccagccctgagctcaaacagcaaccgagctgccgttggttgagcctctgagcacactgttcttgacatctgctaggctaacattcctcacttacatgacctgagactctctaaagtcagaggtcatcccagggaaggaaaaggcggaagcaaaatgctgcaagtcacgggtgagccacttttctagagtcccagagccccagacagaaggggacaaccagcattggcagagaggacacagcagctggtgtaaccgctgacacccttagggacatctgagaaggaagggattattttttttaagccttaaaaattgtttttaaaatggtatatatgtgtaggtgtgtgtgtgtgtgtgtgtgtgtgtgtgtgtgtgtgtgtgtgtgtgtgtgtgtgtgtgcaatcccatgggaaggctagtagagggcaccggattccatggagctggagttacaggctgctgagagctggcctggacaggttctgcaacagaactcaggtccattgacagagtggcaccatttcaacatcccaagaagggattgggtttctttcactcgcagaccccagatctgtgtgagaatcccagagggtagagcaggaaggaagcccacagcaacaacttttccagccttggggacatggctttaagttaggcataatgacagaaaacaacgttcaaaagtcatctctaccacacacctgatgtgccacagatgttaatcaccaaaatggagactaaagaaagggccacgcacaaggagaccgttcactgagtttcgactgagatggtttgcaagtttgcatggatgaggtgcagtttcagctgagttttgaagcatgaggggggcctctgcgtggaaattattctgtcaatgactaaacacttgagaactcaaagcctaagggacaagtgctagtgaagtgtgacggggccatcaagtatacccatctttgggtcggagaaatagggaaaagagaacagaaagacaaggactgggactgcctgccttgacctttggcccacaaacccccaggcaacagagtgcagtgagactcagaaccagaaacctacttaacactacaagggcttaagggctttggcagtttttgcttgctggggtttttgacctctaactctgtagagttcagtgttacgttgcaaggtcaaagcaaggtcaaaacattaggcacacctgggggacttgctgtcctagggagtctagcttcctgtgatcgtccttttagaatttaatgatgctggcatcaggtcagggctgggggaaaggaggattgggcaaagacacttaaggagagacttgcaacagtctgggtgagggctgataagggtttgaaggaggacagtggctgtgggaacagagaggagagtttggctgtcaacagtccctcactgagtacttgtcatgtgccaggccttgtggcaggtcctgaggatccactgataagtgagggcaaaggctaaaacccctggccagccaatcagagatgctacagggctgtgcatgccaccagcggtcacattcaggtccatgtggaggtcagcttgttaggaaacctgtcctctgcttgaccatggcagatattctcagtgataagcagggaagtgaccagcaacttgtttaaatctcacctgtatagaatttcattaacaatacatttgaatgtaattttaaacatgacttggactaaggtgaaagtaatattaatgtatattatagtggcgccggtggggttgctgggtgtatggtcctgggttctcaggcgtggtcctgggaacccaagttctgttggcctcagacttgcagcagtcctcttgcttcaggtgttcaagccctgtctggctaagtgactaattacttcttattcttgtttatttgaggggctgggaataaacctggggcctcttgcacctcaggacacaagaccagtgctattccattgagctacatccagagcctgtggccaagtttcatgctgtaatgtaaatccaaacttagaggagatcactcgccttctaaaccatgcccgtctttcatttgtaggtacagaatgctagtagcttgtctgtcctttccttccgtgtccccaagtctttattattgagccacagggaaggaagcccagagtagggcaggggaaatgaattcctaacaccaaatgggttttgagaagtttagggttgttgtctttggaagcaatcaaactgaaatggttgccagaggcgtccatccatccatccacaaaacatgagtaaggatcaatacacacttataaaaggctgcagggtggggtggtgggtgcacacaggccatgttcaaggtgatcctggctacgaagaaaagcaaacataaggactgctgggcaggccgacatgctgcttgctgctgcttaaggatagcctgtctggagtgggatttgaataaaaaacaaaaagcagggaagatgttaaatttagccatccggatacttcggtgggagagagcagaggtgttgcagacagaagaactggcgagtggagactttctggccaggaaatggtcctcaagggcagccagcagccaggaagcgggtggggaggcaaaggccaggggatgggtgcgctagctagacagggattgcatcattgtcttgtcttcttcctaagagtcaggtgagaacatcgcaggcagagggacacatcactaattagcaaaaacagcaagtgattggcaaaggccaggacttgaggggctcagctgtcaacaccagaagggatggagcttgtatgatccagtccgtgcctgatacaggactaaatgtttgccgaatcaaggctagaaagcctggccgtttttactgcttcatattaaccatattagacaagcagtcttgtgtgtgtgtggagggaagggcatttttcaaattcaacctacaggaaaccatgcatctatgtcactaaaaagcaaactgaaagccttgtgcttcgcttatgtctgctctagacagaccataccctcacctgacctgtccaaatgtcactattacccgagataatttcccatcacatgaccgaatcctaattggccagggggtgatggtgctggaattgctttttgcagcatcccgggggagaattatgtaacagcattaaccctccccccaacacctccaattcattcattttggatcgtttaatcaatgtgttgccggaagtattatataatcaaataatacggtcacttccaaaagccaaagtctgagaccagattaattttcctgcatggacttggtaaataactctttaatatataatgtaagagaacatagcacgggttcattctacagacaaaatccactaattatacccgcgcccgcccgcccctcactaggaggactctggtttactaatctgcacctgagaccagagcaagggatgcggggcctcagcagccagcttggctccagcgctcactccgtgctcccccatcctggaaggctgagaaagtgcagcgtcatcagatgcaggagcccgagtttcctaaggcccgcgcaagcgcactgggcggcagccccctcacgtgtggctcagcgtgcgcagagacacgtgtggaagcacgcgaccacgcctggcccagagccgggcttgctgtactgtgaaccccgtggggggggggggtgaatgacatcattcccgtcttgtcgctaggcaacttgagaaggcgtcttcctgccctgacttcagcagctccaaaggcggacatcattgtgccccttggaccgggctttccaatgagcgagtgtgcaaacccgtcgctcaggagtgtgttattacacacccagtgtgtctgcagagaacctgggagtgtgagcacagccagtcacgtgcttctttctacctgtttggtcacgtgcagttacaaattatatagtattgctccagacaattcggacatggaaatgggagtcctccctagtgacctatggaatccggagtctggggagcgccatggtttagggggcctctgggagggggactcaggcagagctactgccgggaaagctgctgcggggtgacagaagcagagtttatcacagaactgcaggatgcccgcaggatgcttcatgcaaagggcctagaaaccgaaccccagctggagttcaccaaaaataccctatataaaaactgggggtggggggctgggaagtggctcacttgcctggctgggatgccccaggctctgagctccgtccccatggcctcaaaaatagttaaatgcaaggtaatgcttatgggatgtgtataacgcgagtagacctggttgacactccaaccaagtgtgtggttcagtagtttgcatctcatggagtttgaatccagcctaggatgtgagatacacacacacacccttttaaaagtgttaaaataacaaaaatcgatgtcctccctttctttcccacgtgctcaaacccttttgcccagttccaagtcatttggttccaggtccctttagtggaaaaacgtagctgagggagggccactagggaggaaagggggaaacaggcctgatcatgcataggagctacacacttctggatggcccccaaaactgaggggacaagagaacaatggaaccctgtaagggactctgaaaccaatgtctcaggatttcatcgcatgggtactgctgctgtcctgatgtatagagaggcaactgtcagggtcacctctgcccctgcacggtggcttccaattagcacacagttgctcttaaggtcacttgtggcctagctcaattcattccaggacaaaaactaactcttctcaaattatgtgtatctgcactcgggaggcagaggcaggcagatgtcttgaggagaccagcctggtctacagagtgagttccaggacagccagggctacacagagaaacccagtcttacaaaaaccaaccaaacaaaacaacaacaactttttctgtaatagtacgaagagccataaattccccaagccaacaaatctagttctcatcttggaagtcctcaaggttgcttgcctgcgccctctccacaagtgtttgaaagagttgttctttggatgcctgtttcctccttccctcctgagtggagaattggtcattgatcccatctatgaagggacagaagtcaccatggggtatttttgtttgttttgtatgtttgcttagaacacatgccacacaggaggcaaggcaaggcagagctgactgtgaacaaatacatttccccctctgcactatgacgtcaacacgcatcagtgcaactatctctcccactccaggaggggtcaggaccctagtccattccacaggagactctgaagcttagagccagcatggcgataaggggagggggaggagagagagagagagagagagagagagagagagagtaggaagtcctccctcagacttcaaattaatataatttatgaaactaaaaagcaacacaaacttggggggtcagagtcttcacacgaaagcttgtccactctgcaaaacccagtcacctcctctaagccttggcccactgcacccagaggaagccagcaagccctatgcgcggccccagcttgccatgggccactgcagaacatttgctatgtgcaatttgtcagagtctagttctatgactcccgaggcacggagagagacagagttaatctctgatactccagcacttaccacagcctcttggataaaacaagagcaaagcagatgtccagctccccatacctactgtcttgggctttggaaaaggagtgtgtgcagagggcctggtgcctctccccagaggctcagccatgggtgtgtccgaatacaaaagccccccacccccactctgacagtttccagaatgttcttgctggacctgtacctagcatgttccatggtaggtgttacaacccagaaaaggggttcagggtcacccgtgaatggaaatgcccaatcggtcttcatgaatccctttctcactgacctgaaagaaagaagcatccagcccgtcacataacttatttctaacaggagaatgttatcttatcgtttgctacagtctgaaaccattggcaagtggattttattttcacctaagaaagtaatggaaatgcatataaagaacttgaagatgtcaaataatccgatgtggagcactgctgagaatctgagagttttagaaaacagagagagcttgtgaaagaaaccatggctaagaatataagctcacataatttgcttacagcaaagcccttggggcctctgtttgaacctgtttactctcatttttgacacacgttgcaaattgggtgtggttctgtcccagcccacagtaaacaagtaccaaatcaggcaagcattggaggtggcactctggccactgagaagtgacggttgacagactggctgtggaaacaggctggaagtcctataaaaagcaaatgtaaccaggtgtgctggcccatgcctttaatccaacactccagaggcagaggcatgtggatctttagggagtttgaaggcaacttggcctacacaggagttccaggtcagtcagcgctacatagtgagacccccgtctcaaaataaacagattcaagagctctgtatgggtcagcccaagtgcaaacaccgaatacaaaattcataatgtaaaagtgatgcttttaatacccagattattagcaaacatttaatttgcattggatatctttctaggacatttactatatctaaggtagatatagtaaatttcagtgtgtgttctaccaagtttttctaagggaaaaaaatagcattaatctaggagctgctgttgtttaaggcagaatctctagattcagagttttaaaacatcagcttctttttaagtagttttgtatttgcttggagtttgcactgaaatataaggaatacaattttaaggggcatgaaattccgagaatagtatgtttgtagtgcaaatcccttctctgcactccagaaactgttttctgttactccctcactcagattcagccatgaaaagctggctcttgaagtgggtgtgagcacagacaagtctacctagaacttgcttaaaccgtcatgagaacggttgttgaaggtcctcaatatattgatttgaaggttcaatggattggggagaaaaatagtaaagacatgttgctgagagaaaaatccttctttcacaataaggaagcagtcttaattcactctgctcatctctacctgaaataaaaagccctttatagcctgtttgcccagccctgtcttcccaagtccctcatgggcagtcacctcccgcgtagaggacaaacactgacctgtgacagacaggacagggctaaggtcctgcttaccacatgacaggaatcacaaacgctgtggtcccggaagtcagccaggggtttaaatgaaagcagtttcacagtgaggcactccaatactagccagattttcacagctgtggtttctaacgccctgaaaataataaagtttggaggggtagtggggcatttataaattcagtaaaaagttggccaagcaatctatttctgcacaactgaggactactgccaactgcattatagtttaagttggaaaatcacatgacatactacattcagctaatgcttccagtgggcagacacagagaccttctgagtgaattctaatgactcgcaggtaattcattaaaatccaccaatgactcaaataatagtttccaaaggccgagggcctgggccagtggtagcgctctggccaagcttgcccaaggtcctgagttccaccgctagagacacagaagagcacattttcagatgtaatgtgggaaataatgtactttcttttttgccctaatttcacagttttatcctgtgactgtatacattgcagactaaataaatgacctataaaatctggccaaagttaaaaaaaatttttactacatgatacaaaatcatgcaaatgtcaactgttttatcttctgatttactgccatcttctttaggtcatgacgaccgtggcaacaaaatgtagatcaaaatacttaaaattccgtttcccagcttttagttaagagccagccatctttcttgtgactgactctttaccaaggctctccaacccttctgtggttggttaaagtgagcatgcctggcctagagctcgctagagctcggcagtagcacaagttatctagcagaaggggatgaggccaagcactggccctcagcgtctgtgtgaccttgcctgactttcagtacacacacctcaggggactgagctagcagatgtctgaggctgtggcttaggtctgctctgccgggtttgcttgtcacggccggcagaggnnnnnnnnnnnnnnnnnnnnnnnnnnnnnnnnnnnnnnnnnnnnnnnnnnnnnnnnnnnnnnnnnnnnnnnnnnnnnnnnnnnnnnnnnnnnnnnnnnnnnnnnnnnnnnnnnnnnnnnnnnnnnnnnnnnnnnnnnnnnnnnnnnnnnnnnnnnnnnnnnnnnncctacatcttacaaactgccgcttacgggcttatacaccttcaatcaaggggttcaacaacaccactccaaagaaaatggacagccctccagtgcactttgtctcaaaccacagttttgatcacacacttgagaaaagtcttgaaagtgtttcctgaactccaaggagaagtcccataccagggttattttgtgaaagttaagaaggcaaactatactcatgaatgaaacatccgcctgaggtggtagtgtgtttagaacctgggtgagagagaaacaccagaccacacaggagaggctatctgaggtcatggaccaaaacctggtaaatcagaaaaacattagccgactggggttaaggcaaacaagccaccagtgactgctaggtgattccttttgtagttttcattgatagactggagacaagctgggacacagggccaaaaccaggagtctccctggagaccaatgacagaaaaccaaaaccaaacagacaaaccttgtctgatgaccccggatgagctcttgtcctgatacacacaagtctctgtgggggtattcagtattgtttaattattagacaacctcatatcatatataaagtttttattccttggtaagaagttttaaatcacaaaatagtgtggcaatatttagataatagaatttaaggagtgctgaaaataccagagtataaagatagtttctagcttatctttacatactaaacttgtctaaaccggctggtttcttgcagacgtatttatttgtttaataatttaagacagcaaaagcttgcaccaagcattataagcatcgtaaccaaagtgcaaacactctcaccaagtccccccccaaaaaaagatattttaactcaaaataccattagtacatatcttctccctacaaaaatagcatgtcagacgtcattaattgggtgtattaacagctatgtacatacagccaccttggtaggctaagagtttaacgttgtttaaacacagcgtttgaggcaaacagtagcaacagcagcagcagcaaacggaccgaacacactcacagacccagataatgtcttcactccagacttgtgtctcaccccttacgtaacattcaagtgagatttctcagtgctaccttggcaacaaactaaaaatatctagacaaggtcttggtttatgccttattttttttttttaacaagctttccttctgattatctggcatctggtttggtctccagaaaaatacatacagacttgagatggcaggcctgacagggctcccctatgcatcttcacagcacttctgaacacaggggaccactagccctctcctccacttctgccatctaggaatttgagggcaaatcagtcggtctgggtttctctttttccagcccagtgcacttggaaaaatttaaagaaataaaaaataagaacagtaacgctacaaaaatttgggaccacgattgggtaaaataacccgtggggggggaggggcatgcatcagaaacacaaatatatgacctatgacatatatatgcacatgaattgagaaattaaggggacaaggggtttgaggtcaatttgtcaataaagtgcgagcaaaggcgccaaggactccaacctccctcccccagctcccacctggacatagtgcctgaacagggcccaactcccagtctctccaaacaagtgcaaggtatcaagaccactccaaacacctctcaacagggcaacctggcatcctcacctctctgaaaggcaggtacttctcaaaaaagccagaaaacacaaaatactgacccgtaaatttaactctcagaggtcctcagttaatctgagtgcctcctaaagaggcagctgggagacacacctgctgctccacgccctgaagtcaaaggaccctagtgccaggcactctgcctggctccacatggctctcctacccaacagactcccagaaccaggcttgatatctgggaaggggagggggcgtggactaaatttacggtggataataccacttaaccagtacttctcacagaggatctgtgacagcgggggcgaggggtggggtgggtgtgagcgggtagagggtggggtggcaaaaagggtgagaaacgggcaaaacaggaactccaaacgtacacaaaacacctgttttcgtcctaagcctgtcgagcatctcttactcttcctccctggcacgccttagggggcctttgaacttggaaacctggagactcctcgggagccccctgcccctgttcaagaagggctgcggggctcagggggcgtccttggcgggctgcgaggcatcttcctgagagctctccggattcccagcgcgcggcaggtgggtgcggctgtgcgcgtgctgggggcgcagcggccccgggggcgccacctcgtgtgccaggagggggaccagtagcacaagttatctagcagaaggggatgaggccaagcactggccctcagcgtctgtgtgaccttgcctgactttcagtacacacacctcaggggactgagctagcagatgtctgaggctgtggcttaggtctgctctgccgggtttgcttgtcacggccggcagagggaagctgggtggccacggcgtgcaggtggctgacgagctgtgcgcagcgcggctccctgggcgtccagctctcaaagcgcgcgaggtattgcaagacttctttggcgcaggtttgaaaccccgagtggaacgcatccaagtcggcctggaccggcgatttcagagagcgctcccctagggtgcacaggggagggaggcgagaagaaaaaccgcggcattaagacatctgctcatcacgtgggccctgctgcctacagtgagctcggcttttcctgggcattccagcgatataatccgcagactgccgaaaggagggggtggcgggtgatgcgctctccttcgggttgaaaaaacccaagtagagaggcgtagccgacactttaaataaaaacggggtcccttcagctctgcagaaagcctctgggatgctgtgggtacttggcaccaacgggaaagcagaggcaatgttcactaggaggagaacgcagtggggagggagttccagcactgggcccccaacgctccccggtatttgttttttgtttttgaaatcagggcaggcttccttagattcacttaccattctgtaaagcaattatcttctgatgctgctgctctgttaaggctgttagcgcttttaagtgcttcaaagttaattccaaaactacagctttctccaaatgccccagtgtctacagtggtgcagaaaggaggagggcaggggttactttaaaacacacaaattttacttaattagctccccacacagcccatcgacttaggcaaataaaaaaaataaataaaaaaccactgggaaggaagcgctgctcagcgccccacaaggcaggtcatcaatgatctctgccttcagcccggagcccctgttccgagtctctgggaaactccattcctgcctaagttggaagtcgggcctcttaatatttacatttatggccctatctctgggagtcgtatcaggccaacaccctggaaaccaccaaagaatgaaaacgcgcatcttactgtcaatttcagatgttcaggcagcaaatctttcagctgagcaatgcattcattaattcggtctcttctctttttttctattaatctgtgcggtaatttgtaggtatccttcatacatgagccggggggaaaaagagacagccgtaagctaagcattcactcattcacttactagatagaaccctcccaccccaaccccgaaacacaccatgcaatgaactaatgcccaggaactctctcctctagacttctaaaatgcaatttaaattcaggtgcggtgttgaatgtcccccgagtatccaccaaaccacttaaaattcacagtcagggaagctcggggctggaatatatttgcgggcagagtttccctgcgaaatcaatggccctaattaactaccaggcagattatgggaaacttaagacttaccttggtgtcgtctcgcttcaagctccttttgggtttacacatatacaaagcggaataatccagtctgcaaaaacagaaatcagcatcaggcccccattccgggaggggctctgccctcgcccgctccatgtcactttgtgcaggaaaaaaaaaaaaaaaaaaagccaaaccgactcctagacagaaattcgcaacggtgcgtacaccttaccctataaaatccctatgttccagtaactgtctctcctgcaaatgagggattccttcgtccatgttcaatggctgtccgtttcctccttttcgatttggagggttctgtcctgtaatctgtgggacgttcgcctagggagatcttggggggatgtgtgtgtgtctccaggctgtctcgctctccctcttcggcgcagtgttgaaagtgtgaagcagttggccgcccctccgccccgtgctcgctcgctcgctcgccctctcgcacacccgcgcgcgcacacccgcgcgcacacacacgcactgcgctggtagtttgctctcactccaggcagtgtttgcaaggacgcgacttcccggtggctaaacttcagccgggaaggaaatttccgaggctttgctcactgctcgggttgggagggagggaaggagggagggagcgaggggagagagacacccctcctggcgctggctggagggctaccctgaaaaagcgtgacttgcaatccgctctctggaaggatttaagatcagtgaaaatgcactcgctggttctgagtgtcgcattccaagtggcttcggcggcgacacagtgtccccgggctacctaaacttcccgcagcagccggaattgcggtgccactcatcgcagcggcggatgacgtttggggcctcgggtgctcccgggggagtgcggagagggggaggggtggcacgtaagggctgctgcgggaaagccacgcagtccaggtcctgcctgtcccaacttgtgtgacgccgtgctacccctcccccgcccccgtgcgataagccacgccgagagtgtggcgagcccacgtttactactggcacctccgcggcctccctccttaatcccgtctccggcgggtaccagcacagggccggcaacgtgatgcgacctgcggcggcgggcggctgccacatcagcgcgcagggatgccgtgcgcgcgccctgcggccccgggagcccggtgccgtgcggcccaggacaggcgtccccaggtgtcagggttcccgcaactcgggatgaatacgaacccgagtcccaccccggtgaaggtggagaccccgggttgcgcctgccctgaattggcagtcacgttctctgggggcattcgagagcgccggtagcacgtgagcgcagaagggacctgggccccaaatgcacgcgcactggagcgcagcagggccagggcagccgcgcttgggttccggggacggatctgggtcgccggccacggcggctggggggggggacggttcccgggccgccgagcctcctcccagcctggcgcgcgggcgacgagcccgagtcctgggcggagccgcggggatgagttcctctccctctccagcaccctcccgggttcctcgagcgggacgacaccgcgcgacctacagcaggcgattaattaaagataacagtgaaagtgttttttaagatgcgggtttttatcttacgccccggcccgccgtctctcgtctctaagtggtttatctttctgattccgaggcaagttaaagttccaaacagctcattggtgcagcatagaatcactgcttccttctggttcttaaccggccaggttagctgcggcgcgcgggagattgaggtgaatgattttaaaagggaaaaataacagccccaggtccacgtttctgaaagttcgcggtactcaacaagcatattccagagccaatcctccctttaaaataatgactagggcgttagggggatgaataggcctgggtctctgcgtcttggccttgccagtagagcggtcacaagggacagaggactctaggactaagtcgcccagcttttagctgaagctgaaacaggagtcttgaggtccaagggggaagggctgaggtgagcatgtaaactaaccgtccctgaaaagactctgggctgtacccctcagccttctccaacatttccccctccctagcttcctccccttctggtccaaactttaattctaagtcagcagttccttaacctctcccgctcctgatgcagcaggatgtaaatgggctttttgcccattttattttttagttgggtgaatgctttattctcttgggacagggtcgcagtgtgtagtcttggctggcctggagctccctataaagaccaagctggcctggaacttgaacacttagagatggcttgcctctgcttccagaacgatggagtcacatctggcttttgctcaccctcaagttccccgtttaatcgccattgttaagttacccttggatctttctcatactttttttctcttgtccttcatgctcaccgttttgtttggctttaccttgttttcttttccacacagggtttttctatgtaacagctcaggctgtcctggaacacactctggaaaccaggctggcctccaactcccaaacatctgcctgcctctgcctcccgagtgctgggattaaaggcatgcgccaccagcacccggcctcctttaatggttaggatatttcctgtatttcccctctcttaaacttgagtcggttgccacatctgtctcaaactcttgcctgtgggggccagtcatcctcttgtgccaccagatgtcccttgacaacaggccatcatagcaatgactaacagcggcagagcatttaggatgagagaagccggttccctccatagggcttctgaagtgtgaacttactaatgcatgccatgaccctgccaggtgttattagagcctctgtagatgaggaggatacgtccttattggaggctgacatgtgtcagaggtcccacaagcagactttcagccagacagtgtgctctcgagttgcctgctcactccttcacacgaggtctaagtgcacactagctgtgccacaggtgtgagagcgagtgttgggtgtgcaagagagatgggggaaggagagaggaaagtgtggacgtcacggttggagagatggctcagtggcttaacagcactcactggctgctttcttagaggactggggttcaattcccagcaccccaatggaagcttataaatgtgtagcccccaattccagggaacctagcacccttttctgccctcctttggcaccaggcatgcacacgcatgcatagacatacagcaggcccaaagcaacatttacacacataaaataaatgtaaacgagtcttactatttacttctttaagcatgggagctggcatagagatggggagccttgggagatgccgttgagaagtgcagccagcatttagccctgcactgacttagcgtttataacgtcacacgggtgcaccaaagttagttcaactgtgaaaggtgacggtgctcaaattcaccatctttactgagcaaaccaagccaaggcagacatgaagagtctgggttagaactggtcagaactggaaaaggcggtacctgatcagacaaggagcagaaccctgactgtcctcttccggtatgtttacaaacagatggagtcttgcctaatactatctgaagccagtaaaacacgagatgagctcagatccctttcctgattacagtccaatcattcgtgagtgtcccacttgcagttacagagagcctagcttcactagctcttccgcagacgggtggagtgcttgttacctttgctgcttctctgggcaccactgtagtgtctgcctcctcctcagcatctggcctgaaggtggtacctgtagcatgtctctctctttggctctctgtgtgtgtctctttctgtctctatctctgtgtgtggctatgtctctctgtgtgcatctgtctgtctctctgtctctgtgtgtgtctgtctctgtctatgtctctctccatgtgtctctgtctctgtgtctctctgtgtgtttatgtctctctgcgtgcatctgtctgtctctctgtctctgtgtgtctgtctctgtgtctatgtctccatgtgtgtctgtccctgtgtctctctgtgtctgtctctctgtctctatctctgtgtgtgtctatgtctctctctgcgtgcgtctgtctgtctctctgtctctgtgtgtgtctgtctgtctgcctctctctgtgtagttctgggctccatggtccacatccgggctttccttccactgcacaccatctcattttactgaggtctctcatcaaatgtggagctcattgtcccagccaggctcactggccattgagcattgcactcctagctctggcgtttcaggtgtgtgtccacatgcttcctgggcaatcagaatctgaattcaggtcctgtgcccatggagcagacactttacctgctgaggcatctctctagccctctgcctttttattttaacacaggcaaagtcgctccctgtagagactgtggtaaaatgaggcatctagtcccatgtgccaactatactatgccctaaactccaggcacccactgtgtggaggttctatgtgtctcatttcctacagaaactgggctctccctagaggaccatgttcctgctgggaacaggttcctgccttgtcaaggttctccaggcctcaccactcttcaggagaggtggtgtgtggctacttctggattccagatctgaggcaagtgactatctctgatggcccaaagaactgaggtctgcccagggtgtatcccgccacctgtgagctatgaggaagttctttgggtgggcacatgcctttcctctcagagcctagggagggaagtgagggcctggagcactctggacaggtgccccaccctctacctcagtgccccagccctggttgcattttttactgaacatgttttggtgatttagcaagtgtaatttaccactattccacacaactccatgcggaaagaaagcagcttatgaagcaagagtcctcagaaaagttaaaaatgttttgcattggtgcacacattgaagccttggcactgaggctctgaaaagggagggggatgcccatggctcctctcagagtccaaatatggctttaaaatattgatgatgctgtttgctgaaggtactagatttcaggtcccagaatagaaggctgggtttcccagctgcttgctcagcacattggcccaacagcacacacccccatttattttgtaaggagctggtctctccatagactgccaatggatgtgtctctgtgtctgtaaggtgacttaacaaatcacctgttatatctatgtaactctcccggagtgtttatacactcactagtctgtgcagcaccaaggagattggacataatacaacatgcttatgttatactctacatatgatattacatagattgccttgtaactatatcagtaaaatcatacatctagatatttctttctgggcaaatgtctggagccctggctggcctcagattcgtgccaggctcctgcctcagcctcccaagcattgggattgtaggtgcagtagactacttgtggctgggctgatggtattatgtgtaagcagtaaatatttcttttgctataataatttccgtctgtataattttcacaaatgctcaggctatcccaatttctgtatgttcttaaaatccctgggtttttctgcatacagaagatgattaatgaagaggtatgcttgagtccatgaggagtaccgcgtgggaagtactctgacacttccatttctcattaacctggtcaccctcagcatttgtgctcttcatactggttgagactgatctgtagtgatatctaaaaatacaggaaggcaggccgacagcctgcagggcattgcagagtgaccgccactcttgctctgggttctgctggcctggctggagggtgctccctgcactgcagccagtgggagtgctccggaaaaggtcctggagcagcagtgctggacccattgggcaggatccaacagccctttcacagggtcgctatgcacattacaattcataacagcagcaaaactgcagatgtgaagtagcaatgaaaataattatgtaattagggggtcaccacaccatgagggactgtgttaaggggtggcagcattcgctgacccaggctggacctttgttcctgtggagtgcaggatctgtggagcacacatctcagcattgtgtatctggaaaaggacgtcttctgtctggccctgtcctcttctgtcatctcctcactgcgtccgttccctctggggtttgggaaaaggagaaacgcttccagtacaaggatactctctgtagtcgttaatcttcattgccattgaccgaatttagagtcaccatgggaatctggcccctgtagtatctgttcccagaaaggcttagctggagagggaagaccttccctgagtgagtgccagcatccatctctctgcttcctgtctgtggatgcaatgcgaccagccacctcacaacccaccccaccccacccctctgcctccctcaaactgtttgtcccccagaccctctcctcctcaagttgcttcttgtcagatatttgtcacagcagtgagaaaattgaccagtctaccttctggtaactccctgttgctttggggccagaagataaagaggaaagctgtctggtcaagtcaagctgtgttgtcagggaagaaggggttcgctgtgctcaggagatggttcagagggtaggactggttcagatggttcagagtgaatgtgggaagagctcatctgtgggggtctttgctgcagtgcgactcagccctggttaccagcttgctgggacttacagccgccgtggaaatggatgcccaggcacaagtctgtgagggagtttccaggctgggttggaagaccctctctgaatgtgggtgttaccatcccaatggcctagaccctggactaaataaaaagggggaagtgagctgagagctggtaattgtctctctgcttccaggctgtggatgcacggtgaccagctgacagctcaggctcctgccactgttggtttaccctcaaacagtgagccacataaactcttcctctcttaagttgttccttgctcagttattttggcccaactacacctagagtaattaatgcagacaggcgtggaggcaggtgacactgctgggttctctcagcttcttgcactagcccattcatgccactttacagttgcacaactcagctgcagacgggtgttcctggacacctgagcaatgctctacaaggttttcccaggaaatggacacagggatgagatttgctccgagtccactttgcacagtgcttggtgtttgaaaatctgttttccaagttgtatccatcagtgaaaatgtccgatgtttacctctgccgggctgggggcagcactgaggattcagcattgaactgcatcctaaataagctcatttgggggctgaagaagggttagagcaccagctgctcttccagaggactggacttcggttcccagtgaccatctgtagctctccttccagtgaaccgggcgccttcttccaacctctgcagacaccaggcacacacacatacatttgtaagcgaaacactcatacatgttaaataaatcataaacataattttaaaaaccaccctcacaacctaacatctaatttcttgaaggagagctcctcgtcatattttagcgattggcagcgcctttcccttagagggtctgaggtctgttctcagctcatcaataaatgcacatcagaaatcattccagaaatcccagtcagtggcctctgctgtgggagagaagggcctgctctggccacaaggccactgggtagaaagactgatgagaaaaacactttctgcctcgttcccctgagtggtctggccctttgtcacacccaagctctctcagttggccccaactccctggtgtcagcgttaatttctattgtcaacatgattggcttaagaaacacctagagcattaatgagacatgtgaaaaagactctcctgcagtggggtgacactgtcccatgtgttgggccctagaattaaccataactgataaaagagaaggctacctgaaccctgacatcccttctctgctccccccttgccaggcccctccctgtgtgatggacagttcctgagcaccgagagctcaaacaagcccctctcctttaaattgcttctggtcaggtctgtgttcccccgactggacacgttccaatataagggcgtgttgtttaatgcccagcttcccttggctcctacaacttcacgttctgtgtttccagaatgttccgtctctgattctcgttcttcccatgacaagcagcatggctcttcttgtcatcatacatgagtgctctctctgtgctttggacttgcttggctttgccatgtggatcacagctgggttttcttcttgttccccacaccttggatattctccactaagcccctcctacccatctgctgccccttagctctctcgctcacccttgatcactgggtcactagcaggtggccaagggggttcttttcagagggactgggcagggtttggcttagctaatttcctgtgatccaaaataggctgggtttgaatgagtgacttgttatcacgtccctggaccttccagtaaagatgttttatactgcagagaccatcgctttcttcacttggatgcccttcacactgtgagttgtccttctgcctcagcagttcagcctggagccggcagctggcagcccaaggtacaggctccttccagcacatgagagggcacgggtacattagcaagactctagattttaattttttaggcttatttatgtgtgtgagcatcttgtacacacatgtgtaaatgcaccaggtaaggccagcacagggtgttggatccccaagaactggagtcacagctgctgtgtgagtgctaggaaccagacctgggtcctctccaggtcagtgctcttaaccgtgtagctacctctccagccccaagactaaatagcatttaagccaagtggtcactcgtaaccccatctcttcctttacttcccatgttgacagtcagagatgtccatcaaagccctcttctctttgtggatatgatctactttctagaccaagcagccatagtctcttagctcaatgatgtgacctttgccattgattccagccctcagggtttagtgagaatggcaggcatctgaagcaggagggatttaatagagaggcttgaatgcatcactaacctttgggaaggttgggttcatgaaaaggcaagcaaggagaatgctgactttcaggacatcttgatatggctgctcttggccactaagtccaagtattgggcaaaagcctagagatttggatgaaccacaagactcctggtccttttctgagagaatgtctctcacctttattgtggagcagccttatatacaaatttacaaaaaccccaggtcaaagggttcacaacaggatattgatcccaatggggtgaggtcaggcaaacaggaggtgcctgtttgctggaaaacaactcttagagaccccatggggactgggtgccaacatctccagttatcaagtaagaactataagattttaaccattctatcttagttactataactatgtatcttcaactccatcaaagaccatagaaggataatatataaactctggaactgacagagacaccttgcttcctagacagtcacccaaagtttcttggtaaccttggggcatccatctttagcctacaggccacaatgtgtctggcagacttctccgcaaagcaggaaattctaacctgtcctgcattggaaacagtttaggcaacagtagcttcttgcccaaattatgaataggaacaggagtatttttagtaaatgacaccccctttttgcctcnnnnnnnnnnnnnnnnnnnnnnnnnnnnnnnnnnnnnnnnnnnnnnnnnnnnnnnnnnnnnnnnnnnnnnnnnnnnnnnnnnnnnnnnnnnnnnnnnnnnnnnnnnnnnnnnnnnnnnnnnnnnnnnnnnnnnnnnnnnnnnnnnnnnnnnnnnnnnnnnnnnnnnnnnnnnnnnnnnnttgccatgtcaaagtcaaactctataacgagtttcttggatgcccatcttcctctcagatataattggtgtgccaggagcagttgtgtctcactgtcaagaaaaaccctaaaccatttaaatgccatatattccataggtctttgaatggtagttgaggtacctattttctagtaccttttgtcaatccacctctctcaggagttgaggtacctattttctagtaccttttgcaatccaccctctctcaggagttgaggtacctattttctagtaccttttgtcaatccacctctctcaggagttgaggtacctattttctagtaccttttgtcaatccacctctctcaggagttgaggtacctattttctagtaccttttgtcaatccacctctctcaggagttgaggtacctattttctagtaccttttgtcaatccacctctctcaggagttgaggtacctattttctagtaccttttgcaatccaccctcacaattccttacttgctttccagccttctgagggtgatctctcagggtcccctttctttcccaatctcggtgaaacctccatttgtggctgctcttggccactaagtccgagtattgggcnnnnnnnnnnnnnnnnnnnnnnnnnnnnnnnnnnnnnnnnnnnnnnnnnnnnnnnnnnnnnnnnnnnnnnnnnnnnnnnnnnnnnnnnnnnnnnnnnnnnnnnnnnnnnnnnnnnnnnnnnnnnnnnnnnnnnnnnnnnnnnnnnnnnnnnnnnnnnnnnnnnnnnnnnnnnnnnnnnnnnnnnnnnnnnnnnnnnnnnnnnnnnnnnnnnnnnnnnnnnnnnnnnnnnnnnnnnnnnnnnnnnnnnnnnnnnnnnnnnnnnnnnnnnnnnnnnnnnnnnnnnnnnnnnnnnnnnnnnnnnnnnnnnnnnnnnnnnnnnnnnnnnnnnnnnnnnnnnnnnnnnnnnnnnnnnnnnnnnnnnnnnnnnnnnnnnnnnnnnnnnnnnnnnnnnnnnnnnnnnnnnnnnnnnnnnnnnnnnngaactataagattttaaccattctatcttagtgtgttactataactatctatcttcaactccatcaaagaccatagaaggataatatataaactctggaactgacagagacaccttgcttcctagacagtcacccaaagtttcttggtaaccttggggcatccatctttagcctacaggccacaatgtgtctggcagacttctccgcaaagcaggaaattctaacctgtcctgcattggaaacagtttaggcaacagtagcttcttgcccaaatggatcttcttgccatgtcaaagtcaaactctataacgagtttcttggatgcccatcttcctctcagatataattggtgtgccaggagcagttgtgtctcactgtcaagaaaaaccctaaaccatttaaatgccatatattccataggtctttgaatggtagttgaggtacctattttctagtaccttttgcaatccaccctcacaattccttacttgctttccagccttctgagggtgatctctcagggtcccctttctttcccaatctcggtgaaacctccatttgtggctgctcttggccactaagtccgagtattgggcgaaagcctggagatttggatgaaccacaagactcctggtcgttttctgagagaatgtctctcacctttattgtggagcagccttatatacaaacttacaaaaaccccaggtcaaagggttcacaacaggatattgatcccaatggggtgaggtcaggcaaacaggaggtgcctgtttgctggaaaacaactcttagagaccccatggggactgggtgccaacatctccagttatcaagtaagaactataagattttaaccattctatcttagttactataactatgtatcttcaactccatcaaagaccatagaaggataatatataaactctggaactgacagagacaccttgcttcctagacagtcacccaaagtttcttggtaaccttggggcatccatctttagcctacaggccacaatgtgtctggcagacttctccgcaaagcaggaaattctaacctgtcctgcattggaaacagtttaggcaacagtagcttcttgcccaaatggatcttcttgccatgtcaaagtcaaactctataacgagtttcttggatgcccatnnnnnnnnnnnnnnnnnnnnnnnnnnnnnnnnnnnnnnnnnnnnnnnnnnnnnnnnnnnnnnnnnnnnnnnnnnnnnnnnnnnnnnnnnnnnnnnnnnnnnnnnnnnnnnnnnnnnnnnnnnnnnnnnnnnnnnnnnnnnnnnnnnnnnnnnnnnnnnnnnnnnnnnnnnnnnnnnnnnnnnnnnnnnnnnnnnnnnnnnnnnnnnnnnnnnnnnnnnnnnnnnnnnnnnnnnnnnnnnnnnnnnnnnnnnnnnnnnnnnnnnnnnnnnnnnnnnnnnnnnnggtgaggtcaggcaaacaggaggtaccaggggttatgctggaaaacaactcttagagaccccatgggggctgggtgacaacaccttgacagtcaggaattgggggttgggcatggagaccgagtgtgcctgaggtcactgctagaggtgtgcagtgacgtgcaggaagtgacaggaaaccactgtgaatcttaacaggtggacgcatctgccgcaacttgccgcatttcatgcaagggccccttgttggcagagtctgagctggggccatgtagacaagggtttctggattgtgactctaagctcccctcctgtgacagggccgggcgtgggaggcagtggagctggtacacagtggactgtgagttccgtgcctcacacccacgcacacgcccaccttgtctcaccgacacgcctactctgctcaccatgctttggccagaatgacgtttccggtgcacactgttctcctaacctagtttctcaagtcataaaagcagagactcttctacggcctgaaggatgctgtgggtggctggcgtggcaggtatctgctccttcagcctcgcctgtcacttctctttgttgtctccacatgccagcacagcactcactctacagtttgacttgaattgccccacactttctagctcaggccttcacaagtttttccactttttgaattcctcagaaccccatccctctctctgctcagcctttaggtgacatctgaacatggctttctccaaggagctcttcctggtttgcttaccacactcagcttccagaattgccccagaattgcacctgctgttgttttaaagaattaattctgccgtggctgggtttgtttgcttatttttgtttttgtttttgtttttttttgtcatgtgtgttcatgtgtgtgtatgtgcataggcatatttgtagtttatgtgattgcatgagtatggtgtgcttgtgttcttatgtatgctgtgtttgtgcatgtgtgtgtgtgtattcgcatgtgtgtgtgtatgcatgtcaatgtctgtgcatgtgtatgagtttggtatgtgtgaatgagtaagaggtgtgtgtgtgtagaccagaggccaaaacttcctctattgccgacattacttttttctctttgagatgaagtccttccactgaacctggagctcaccaatttggctagacttttgggctaagggcttctaggatctgtctgtctctgcccacactgctcagaactggggttacagatattccactgtgcacggttttcacacaggggctggggatcctaacttaggtcctcacgcttgctttgcaagcagttcaaccactgagccatctccccagcctctcatttatggtttgaaaggtccgtgaaacttaattctctgtcttcctcattagtctgtgagcccaacaaaggcagactcctcccctcttcattccttcgttgtcaagtctaagtgtggagctcagaacagatacatatctggtttttgtgactcctaaagggactacactaaatcttctatgttgcagagaatcctggaatgacaagtcatatccgggctgtatgacagttgaagggtcttggtgcctgttgcaggtgacgagtctaatgctgttccccgtcgtcctatggccttgatggactcgggtgttcgtgtgtctattttggacagggccaccctcaatgtgcagggcactgcatcctagtttcttggtctcccaagcctgtaaggtttaggaactgcttgggatacagcaggcagcccagtggcctggatctttgaaggagtgtgagtcctggtgggggcagggtctgtgcctctggaatcgttgccagccatcatgctagggcggacgtgttctgtgcccagagggcagaagctgcgccagcaggctccctagcaatctagtgagttggcatggctcacttgcagaacttttgcctccattcacagtgtatgttagcatggtagagagacttcctgaactggagcagagctagttgaattccacaggtgtgccagtggccagggactgagaggtgacatacaggccatggctctcaagggccctggagtggggagtgggcatagatcctgccatagtgaactgttttcccaagtctattgggctttgtggattacaggaggaggtcttggggctcagccaaagagcttggttaccaggagtgcagaaagaaacaagcagtgtgccagggtggaggagttggggctcagactcaggaacaaagtgggagcgtgaagaaccacagaatgaagaagctggcctatccgaatgccaaactagtaggcacagagctaggggacaagcgtcacagaggagcgtgggagcagcatacgggtgactggggccaggtgtggaccatgggcacaatgagactgtccttggggtggttagttaccttacaggctgcaacagggtgagggctgtctcaactgtcagccccaaaccagcaagcacttagcaagcaccgggttcccactcccaaaatcaggtatttggaaggcagtgttgatcttcctggtccagaggctgcagaatcagactgattcctgaagccgagggtcagtggtaggcaccaaggtgtgcaggttccatggcgacctgagaatgcagtcattcttgtgtaacatctttgacattagtgatcttgctgcattagaaaccttgcttcagaggaaccacgcggctaatggagcgaatgaatcacagactcgcgcccctctgtttcttggattccttgttgctgcctggggtggtaggatcctgtgggcttcacaggcaagagacctgggttcactagaagatggaggcaggaggattaggaattcaaggtcgccctcggctacccagtaaaattagttcaaggcaagcctgggctacacaagaccctgtatcagaaacttaaaacggaaagctaggattagtcaaggtgcttgtgatggaattgtggggacatcagtctgaaccctagagctcacatgaagagttgcagagctggagacatggagacagaaggacagccagggcttgctgcgagtcagcctggcttaactgacaagctgagagactgtaaggaggggcttgacattcctgagaatgacaccggaggttgacctttggcctgcaagcgaacatgtgtacccatgcgtgtacaggtggacacacatgcacctgcactcatacaaggccccatcccagagcaaatgcacagaaatcaaattaaacaaataaaaccaagaggtgtagatgctgcgttcccttgacctttgggcaggtgatcaaggagtctgttttctggaatgggacacagagataataacgcctgctgggattgctggtagcactgtctgtgatgaagcatggagatcatctgcagcataatagctgagtgacaattggtcactgctgtttgtgagctgcctggataaaaagtgggggtggcatggacaacatgggcgaatgaaagcagagatgagttaagtaatgtgtttgtaagagagaaacctgtggctttcagctgtgcgatgatggtgatggtgatggtgatgatggtgatggtgatgatggtgatgnnnnnnnnnnnnnnnnnnnnnnnnnnnnnnnnnnnnnnnnnnnnnnnnnnnnnnnnnnnnnnnnnnnnnnnnnnnnnnnnnnnnnnnnnnnnnnnnnnnnnnnnnnnnnnnnnnnnnnnnnnnnnnnnnnnnnnnnnnnnnnnnnnnnnnnnnnnnnnnnnnnnnnnnnnnnnnnnnnnnnnnnnnnnnnnnnnnnnnnnnnnnnnnnnnnnnnnnnnnnnnnnnnnnnnnnnngatgatggtgatggtgatggtgatgatgatgatagtgatggtgatggtggtgatggtggtgatgatgatgatgacagtaatgatgatggtgatggtggtgatgatgatggtgatgatgatgatgatgatggtgatgatgatggtgatggtgatggtgatgatgatgatagtgatggtgatgatgatgatggtgatgatgatgatgatgatgatggtgatgatgatgatgatggtgatgatggtggtgatgatggtgatgatggtgatgatggtgatggtaggatctgaaagagaacaatagaagaagagccagaaggctagacccaccaatgtggatttcccctggtgcactgtggttaggagcccaccatgtctcctgtgctggttggaaggacacagtactggtcataaccttgtgctttccactcctgctcttcagacctctgtgagagatcacagagcttttgtgcagctgatgggaatggcaagtgtcctggcagtcattgtctgtcatacatgaactcccccttaagtcttagataaaacatacagcagatattttgacatcttacttttttatgtccactcctctaataatgaaaaacaaatttttggtgtgtgtttgcatctctctctctctctctctctctctctctctctctctctctctgtgtgtgtgtgtgtgtgtgtgtgtgtgtgtgtgtgtgtgtgtgtctgtgtctgtgtgtgtgtgttttactggggtttgaactcagggctttattctcagattaacttgtaccagggagatctgagtaaacatctcttgctccatagaaggtaccaagtaaaccagtgagattactgggcaaacttacagtgcacaggtgaggaattacttatgggagggtgactggctcctaaacagctgaatcaccacaaagtcccaccttaccatggatgctgacctcacagaagctgcatcatgcagacccttacaaaattttcaggcaatttggctggctggacagtttcctcttcaatcaaccattgctgcttatttaaccttggggaagggctttatgagccttgtaggtttcaggaacttcctaagacttgaaagtttcatttacttcctgagtctgtgagcctcctatctccctcttagagggattgtttcaacttgcatgaaacatctaggcaacacttggatgtactaggcaagtgctccaccatctagttacatttccagcccttttgtaatttttaattttgagaatgggtctcagtaaattgaacttgagcttaacttgggaacctggttagggcttgagcttgtgaaattctttccttggcttctcgagtagcagagattacaggctttgccactgttactctctgccattctcttagagccttacaaatactaactcattaaattactcaacagctgtttggatggatactgggatcagggcatcagaaaatgaggactgagatacaagctaagagtcagtgggagagcagggtctgaagtaggcaggaagctgcaggcagcagagtcatccttacagcccctcagcaggatgtcccaccagacagccagacaaagcagagcaaagcatccatccaccctgggggttttgtttgaggttcaccatgtcagaaggcatataggctttggggtctaaaactctgggcacaagatttaattatgacccatctgcctgtctgggaaaggcaaaatcttgaccaatacagtagttgctgtccacatgtggttgttgagtactcgaagtatggtaagctaaactaagatactggatttttcattgcatttaattttagccaacttaaatttacatagccacaggtggttagtggctgtcctgttgcacagtgaaagtccagctgctttagtcatttctaaataccatatgccagacagcttctcagcttgttcctttcctagcatgtgtgtgatgtattgtgtgggaagaaaaatactaattactaagcttgaagtcaggcaagtaaagagaaccacagccatcatcctcccaaggctttgttatctgattaactgcctgcctatcttctatctatctcagtttctctctcttctatttatctatccatcacctgccaatctccctatctccatttctctttcatctatctatctatctatctatctatctatctatctatccatctatctatctatctcagtttctctcatctgtttatcatctatctgtcagtctccatttctctctcttctatatctgtcatctatctatctatctatctatctatctatctatctatctatctcctgtctaacaatatccatctatcattcattttagtgcagaaagcaatcggctcccttatgacattttcttgcacctgggtcatggtaccttgtatgcgctctcccctgactgccccccttccctcctactctcattgctggtctccccctccctccaaagagtccccttgttgctttcatgtcacacacccacacagtgttccacaatcagagaaaatccccactgtcttctgtctccacattgccctcttacccctccctttagaatcctcttgtgcccctagtctctcccttcagctcctatctttcatgtccatttgaattttactggaaaccaaatggtataatatattaacatataagaatagtggccatgaatgtgctgtgaacatattatctacttcccataaggaaatagtaatatcataattttcatgctggattataatgctgagtgtagtagtcagggttagatgtgagtggcagtgtggtgatgaatgtttagctggtcctctgggaaaagtgtgtgcgtgtgtgtgcgcgtgtgtgtgcatgcgtgcacgctcgcagcgctttcagtaagatgtgtagaaaaggcacacagttacgtgcaataataaaatatgcattactcatataaagttcctgaagccgattaattctcagtgaatgcttttattgatttctgctgagcactgagtcccttgccagcctacagttgcaattaattcataaatgtaattccaacatgaagcttggatgatactttggttggttttactgattaaggtgaaagtactatgtagaataactttttgaataaccttagtcatatgttaaatgtatgagcaatttgttacttaaataataactttcacaccatggaaattgtttcttacattcgtgtgtgtgtgtgtgtgtgtgtgtgtgtgtgtgtgtgtgttattcaaaatgcaacatacagacatgacgcagagtttagcataattggcatggtaaacatttttcactggtctaacaacaaagaaaatcaacccctgaagctcttagcaatttctgtagtgtaaatacttgcaccagtttcaagctgccagcatgcttttagtgagagtgaagttggggtattgcaggcagggagagagcagaaaggagctgcagtgacccatgtgtgcaattctcttcaccacccaccatcagccatgcattctgaatgtttagaaagaaacacctggcatgctggcacgtggaacacatggtatgttattgaggtggaccttgaagtacagtttgctgatttgggcaaatgttgagtaaaaggctcgtgttgtcagctagagatttaggctgcaggatgtgctcatgatttagaaaaacaacatgaaaatgaactctggcctccatgctccaaggcaccaacaaacaaaaccaatggaatgaaagaccccaaagagctcccagcacctagggaactggagttgtcactggaactgagggagcagggtgccttccctgtttagtcacaaggcctgctaaaatggaggcatgtgacatctgagctgtggctctcttccatgacacatgaactgtggccctcttccacggaggccccctcaagaacagaggtgttttccattattctatatgaaacacaaagcaggagccatgatgaacaggtaccaaccactctagcgatttttccatgtgaggcagaccggacggagcaccaggatgggagagagcctgcttttttatttactcctgactcttgaagatagaccggagctcagtaaatacttgtagaaggacgagatgacctcacagaaactttgactctgtcatcacacgattatatattagttatattatcaacattgtacggatatgctgttggtattctaaatactgatggaaaccatgacttggagctgggtctggtgctgtgaaacccagtacttggaaggctgaggccaggggatcatttatattcatcgtcacagactacatgccatgatggaactgttaaacatataatcacttgtatagcaacctatggagacactctcatgcatcacttccattaatgtgtgctggtggaaatgggaatgacccacctaccctctgtctctatggagttacccatttggacgttctcgtgtgaagagaatctcgtgattcgttgccttctgcagttgatttatttaatttcctgtcttcagggttcatccttgctgcggcatatagtattttatttcctttttattgctagatatcattgcattggacggatatagacattctatttgtccatttagcagttgatagaattttcttttgagctcttatgagggatgttctgagccccgggctcgaagctccgtggcttgttttcacttctcttgggtttgagctggggctgctgctgagtcatatagtgacagacagctttgcaaaatggctgcagtgccctgctgcattcttgcgggagtgtatgagagttccattttctccacgtgtgatcagggaaattgcaacacaaaggtgtgatgaatattaaaggaacttctcagtaagcgtaaaacttttaggatttgattgaattgacctaaaatctgtattccaagacatagttttagttataatcctgtaaatctagataatatagaagaataaagcctccatgtgcagttatgtttgttctgcaggctttaacacatgaccaaaagcatggattctggaatctgaacaaggattttaggccagaagggtttaactctctttgtttggatgctctaaaaaatttaagtaaatttataaatacaagttgtggtggagcgcatctgttatcccaggactcgggagatagaggcagagggatcgagagttcagggctagcttcagctacttgagagtcatgtcaaaaggaaacaaaataaaaaaacaaaaatgcaaagtggcaagcaggggtaaggggatcatgcttaatcctggtttctgaaaacactggtgtctgagcttcagctccgttaacaccctgtaacataataaaaccatatatagtataacaaaggtgtgaggagactaaggcatgctgatattacacgacaagaggcctgcaggtgctccttcaaacatgacatagcatgttatcatgtgtttctgtatggcctgaaacgcctggacaaggcctttacatttttttctccccgctcatcctctgccggctgacggtggagggttttcagtggagagagcttgcttttcagggcttgcctgtttgtgatgcctggtgacttcctgcagatacaggtgggcctgtgggcgagtacctcaagtgtatggcatgggcacgcccttaagcgtggcaagtctctcggaatttgtcggatgtgagttcataccacagtctttgcagctgagacaaggttttggatgttttaaatacatgttagttaatgttaatttaatgaagtaaatatttcatgaaatacataccatcaggggaattttttttctaatggtattaacttggactttctgtctcctttttttaaaaaaataatcttattttacatatcaatcccccctcccagttccctctctttcccatcctcccatgcccctgtactaaccccccaacatactccacatccactccccaaggggagtgagggatcatcaaagtctgtcacatcatttgggggaaggcctaggccctcttccgtgtatctgggctgaaatagtatccctccatggggaatgggctcccgaagtccaatcctgcactagggataaacactggttccactgttagaggtcccatagactgcccaggcctcctaactgacacccacattcagagtgcttggttcggtccaatgctggtttcccagcttacgactggggtccttgtgctctcactaggtcaggtcagctgtttctgtggtttctccagcatggtcttgactcctttgctcatcactcctccctctctgcccagctactggatgaaggctctagnnnnnnnnnnnnnnnnnnnnnnnnnnnnnnnnnnnnnnnnnnnngggaagggcatcaaaggtggcctctccactactgcctagattcttagttggggtcatctctgtggatctctggacatttccctagtgccagatttctctttagacctatgctgattccctctattaagatatctcttttcttgctcttctctatttctcccctgactcagtcttcctgatccctcctgttctcctcaccccctgtcttttcctcttctcttttacctacctccctctcctgccccgtgctcccaatttgctcaggagttcttgaccctttcaccttctttgggggaccatgtatttctttcttagagtcctccttgtttcctagcttttctggggttggtaatcctttgcactatgtctaaaatccatatatgagtgagtacatatcatgcttgtctttctgtgactgggttatgtcactcaggatggtttattccagttccatgcatttgcctgcgaatttcaagatttcatttttttcccactcagtagcactccattgcataaatgtaccacattttctacatccattttcagttgagggacatctaggtactggctattgcaaacaatgcttctatgaacatagttgaacatatgagtgggcatcctttgggtatacgcccaagagtggaattgctggatcttgatgtaggctgattcccattttcctgagaaactgccacactgatttccaaagtggctgcacaagtttgcactcccaccacaccctctccttcatagactgtcattggtgtttttgattttagccattctgacagaagaaagatggtatcttagagttgttttgatttgcatttcctgatggctaaggatgttgaacactttcttatgtgtctttcagtcattttagattcctctattagaactctctatttagttctgtaccccatttttcaattggattgtttggtgttttggtgactagcttcttgagttccttgtatattttggaaatcagccctctgtcagatgtggggttggtgaagatcttttcccattctgtgggctggtgttttgtcttgctgactgtgtcctttgccttacagaagcttctcagtgtcaggaggtcccgtttattaattgttgatctcagtgtctgtgctactggagttacattcatgaagtgatcttctttagaaaatcaacaagacaaatctttatccaaactaaccaaaaggcagagagagcatgcaaattaacaaagtcagaaatgaaaagggggacataacagcagacactgaggaaatccagagaatcatcaggttatattttgaaaacctgtactccacaaattttgaaaatttaaaggaaatggaaatttttgtggatagatatcacttaccaaaattaaatcaagaacagataagcaatttaaatagacctatatcccctaatgaaatagaagcagtcatcaaaagtctcccaaccaaaaaaaacacccagggccagatggtttcagtgtagaattctaccagaaattcgaagaagagctaataccaatactcctcaagtattccacacaatagaagcagaagggtcattgccaaactctttttcgaggctacaattaccttggtacccaagccacataaagacataactaagaaagagaactgcagaccactatccctcatggacattgatgggaaaatactcaataaaatactggcaaataagccaggtggtggtggcacatgcctttaatcccagcactcgggaggcagaggcaggcggatctctgtgtgtttgtttgagcccagccttgtctacaagagctagttccaggacagcctccaaagccacggaaaaaccctgtctcaaaaaacaaaacaaaacaaaacaaaacaaaatactggcaaataaaatccaagaatacataaaaaaaatcatgcaccatgatcaagtaggcttcatcccagggatgcagggatggtttaacatacaaaaacccatcaatgtaatccaccatataaacaaactgaaaaagaaaaaccacatgatcatctcactagatgctgaaaaagcctttgacaacatccaacaccccttcatgataaaggtattagagagctcagggataacaggaacatatctgaacataataaaagcaatacacagtaaaccaacagccaacatcaaactaaatggagagaaactcaattgattcctctaaaatcagggacaagacaaggctgtccactctctccatatctcttcaatattgtcctggaagttgtagctagagcaataagacaacaaaaggagatcaaagggatacaaattgaaaggacaaagtcaaactcactatttgcagatgttatgatagtttacataagtgaccctaaaaactctaccagggaacccctacagctgataaacagcttcagcaaagaggcagtttacaagatcagggggattttaaggtgtgtttggggttctattatgtgcatctgttgctagaagggcggggattgatcctgagcccacttatcagcacagtgccctgtgtcccctgtgtgtcggaatccctgtgaccaggcaggggcaggctgctctgccactcactcactgttttcctgctcctagctgggatcacagagcagctgtatcccagtcttaccatgaggtggatttggagtaacttagctatttcctcaaagtcttgctcattctctcctccccgcttttctctcccaactcgtgtgtgtgtgtgtgtgtgtgtgtgtgtgtgtgtgtgtgtgtgtgtgtgtgtgtgtgtttgtgtgtgtacatattcttcatgcatgtgtgttccggtgagtgtgtgggagttagagggcaaccttgatgttggtcttcaccttctgctgagtttaaagcagcgtctctcttttgttagttgtggctgtgtacaccacactagctggcttgaaaactcacaggagttctcctgtctctgtctcccctctcaccatagaaacaactggaattatacttgttcggcaccatgccagctttgacacaggttctggggattcacttttgtgacttcacgtttgtggggccaatgcccaaccgtctgagccattgcctaagctctgcttccttgacttctacttacacagatcggcctctggttaacctgccttgagcaaacagaatgtggaccatctgattctttttctgggcagtggcagagagaagactctaaattgatcagattatgattttgaccaaatcagcctgccgaatggtctagaactgactttttaagataacagataacagtgtgggtttgtgtgaagacccacacagtctaatgccacgtggagtagatctgggtgacggtgagggcttgaagcaagtgctgctgctttgctgaagagtgcacagcttcaggggtttgcattctccaaccgttaactcgatttgattgtttcaagcaccactttctaaacttttgccttcctctggtaaaaccaagaaagacgttttcctctttaaaagcttctggagttttgtgttttcttctccatgcttcgcagtctgacatttctcaccagagacaaatgtagactgttctggaatcaaggtacacaaaaatgctccaacgcgctgcctcatgcccaagtctaggggcatttcacactcatgtttgggcgcctcacactcaagcttgggtgcctcacactcaaactgggcacctcacactcaagcaatgtgtctcacactaaagctaggcacaccacacaagggtctgggttttaaataaaccagtcgtcctccttgtccttcagtaggtattactcaagtaaggtttgcaatttgcaaaactctaagacactttctatttttaaagtataatggagaagcatttatgataaaaatcacaaataccagaattaatccccttacttgctgcatggaaactgtcttgaaactggctatcagcagaggcgctgcctgtctcagccttgattctttgttattgagaattattctgagcttttaagtggtttatgacactagaacccatgcgtggcatataattcatactcagtatgtgttgcttgttgttagtgttgatagtggcagctccaacaaacttaacattttggaaataatattctatgcggggcggcagactctgtaagttgccctagccaaatatccagtgggatatccagttacctggtcattgtgctttgctggtaatacaggaaatatatgcaaatgggtacacacacattggcaggcacacaggacacacatatgcatgcactcacacatatatacatgtacacacacacacacacaccactcaaattcatccatattgagcctggagcttcccagggaatgttctagaatccaagtcctttgcattgtgcacctatgttctcaaggtcctccattcatccctcgtggcttttgaagcggagaaagaagcatgagcccatcactgctctctacagtgttagcacaagccaatcactatgctctacagtgttagcatgagccaatcactatgctctacagtgctagcacgagccaatcactatgctctacagtgctagcacgagccaatcactatgttctacagtgttagcatgagccaatcactatgctctacagtgttagcatgagccaatcactactctctacagtgttagcacgagccaatcactatgctctacagtgttagcaggagccaatcactatgctctacagtgttagcaggagccaatcactatgctctacagtgttagcaggagccaatcactatgctctacagtgttagcaggagccaatcactatgctctacagtgttagcaggagccaatcactatgctctacagtgttagcaggagccaatcactatgctctacagtgttagcaggagccaatcactatgctctacagtgttagcaggagccaatcactatgctctacagtgttagcaggagccaatcactatgctctacagtgttagcaggagccaatcactatgctctacagtgttagcaggagccaatcactatgctctacagtgttagcaggagccaatcactatgctctacagtgttagcaggagccaatcactatgctctacagtgttagcaggagccaatcactatgctctacagtgttagcaggagccaatcactatgctctacagtgttagcaggagccaatcactatgctctacagtgctagcacaagccaatcactactctctacattgttagcacgagccaatcactatgctctatagtgttagcaggagccaatcactactctctacagtgttagcacgagccaatcactatgctctacagtgttctgtctcagacttgaagtcaattcctggcaactgaacactgtcctaaccttggtcacccatggtttatagctctgtcttgattgtgtcagagggctcaaggccaaattcccattagccatataggcagaagcacttttcagaaagtggactgactccaaaacagcacgggggtgcttctctttgcccacccaacacacactcattccatacacatagcctgtctgggatagtgctcctttccttgcctgggtgtttcagttctgaatggcatattccaacacgggctttaggagccaccccaccccaaacgtgtaatctcgaggtttagtctttaaccagctctctatacacatgctacaaaactggtttatgtttccacctaaactattttattttcccaggaatgactatgtagattagttatcacattatacagtttaaacatccttcctgcagggctgttcacaattgcctgtttaaaaagaagcaaaataaaaagatacacttctaacttttgtgcacatctttgcatgtttttaatctgggaagccatctacatcattataaactatctccctactagaatatattaaagaggaccatgtggaccccagagtgtagaaatcaactggattttagtaggaagcataaggctttgggattttctagactcatcgtacaaacctaagaacggagggccatcaccgcaattgacaatgtgttctagtcaggatagttttgcctctgggaaagtcagaggcaggcaggaatccctcctgggattctcaagtctgagctgtttggctcagctccctagaaaactattcactggccagtgtgaacaggcctcaagagatgactcgctgtcacagtcatttccaagatgcttaaaggtacacagctcttttgcattgcattctgggtattagactggcaaatgttagtacagtttcaagaaagacttggaaataagcacacacacacatacacacacacacacacacacacacacacacacacagaaaatctccatgtctatgccccctcctttgagtaggttcctctcccacttttggaaaaacagtcacgttgggtgccagcttgagatcggcttccgtgaaaataccaaagcaaaactccgtgtcagttacttttctgatgctgggtcaagaagcaagaccaaaagcagcttagacaagaaagggcttacagttccagactagtgtccgggatggctgggagagtatggcagcaggggcaggaagctggctggttacatctccatccacacaggaagtggtgggggcagagtggacaggggcaattctatgacacctcaccccccaccgcccctgtgatgctgtccctccttcaaggctgtgccacccctgctcctatccatgttaaatctattggaaatgcgcatgagagcaaaggagcaaggagggaccatccccaggtatgccggccggttctttcctacacaggcctcttctcacttgtaaaaataatgctccctctacagcgtttgcctttttctgttcccctgctttctgagatctggggtggcgttctcagcttctgttcagacacagcttcatagaaaatccccattataagggaataactctcaccctctcattcagtacatatttatgaaatactgtctggccatcagaaacttctcagagttcttaaacatacaagcacacaaggcctattgccttgagggactggcattttcatccccacaggggcttcgacttctgcctcacggcaatatccagccttggatataccttgtgggtggcaagttccaagggggcatttgttacaaatttctcacaacagggtcatgggatttgctgacatacttgccttggatatgtagaacatatcttttgttttttctctatctggtctaatatttcttacgtgatccatacagtagcaaactgcatgcaaaccagaggctggggatatagttccatggtggagcattgcataaaatatgcagaggaggccctaaccctgggtaagaacaaacacttcttgtaaatgaaaacaaaacagctagatttttcttctcatccaaggtgatggattaactcttggctttgggaggcgttgtactttagtttgaaggagacaaggggcaagaggcattcccatcacataagacctttggcaagtggcaggttgatgatcttttgtgctattcataatctactgactacagcctcaatgtgcttccaagtgtgactgtcatctttcagatttccctcatgagtttcttaactctagacaatcaatgaagcaacaatttgacagagccagagagacagacggctcaggggctaagagcacttgctgttctttcaaaagacctaggtttgggacccagcacccccatcgggtggctcataacccggctttaattccagttccagggtctgatgctctcttctgttctctgagggcacccgcacttagattcacatacccaactgccacacacacgtagacataattttagaagcagaagtcaatcttgaaaaaggaaatctgagctctggtttgtagcatttgctcattaccatggcgtggcaactgccagatctgacgtcagagaaagcatgatagcgttatgtcgtgtttccactgaatggagcagtagttgtaaatcgcctccgagaacagcatgaatccaaaggaagtatagcagccaggacgtggtaaatgtggactctatcacctctgcataaatacagtttttttttttaattgcagattgtgcaattcaaattttaacaacggctgggtgggacagctgcttgcaaaatgtccagcaatttaacagttagctcgggagctgtctcagtgtcaggctgaaaatagtgaccaccagtgacttccctctgtcttcttcatctgacagctaatgtgctggctttcctctcttgcctgtctgcagtcactcttnnnnnnnnnnggggaacccaccccccctccactttcacacacccctgcccccacaacgtgttctgtccacttgggaggtgtcatactggctggttttgtgggctaacttgacacctagagccatcagggaggagggagcctcagttgaggaaatacctccatgaggtacagctgtaaggcattttctcaattagtgatcagtgggggagggcccaggccatggtaggttgtaccactcctggactggtagtgctgggttctataagaaagcaggctgagccgggcagtggaggcacatgccttagacccggcactcgggaggcaaagataggcagatctttgtgttgaggccagcctggtctaccaaactacacagagaaaccctgtctcaaaaacaaaacaaaaaccaaaagacaaagaaaggagctgagcacgtcaggggaagggaagcaagccagttagcagcaccctccatggcttgtgtcagctcctgcctccaggttcctgccctgtgtgagttcctgtcctgacttccttcagtgatgaacagtgatgtggcagtgtgagccaaaagaaccttttccctttgggtcacgatgtttttgtcatagcagtagaaaccctaactgagacaggcatctcaggcaattccgcatccaggagccagcctggtcctgaaagtgtgtctcatgttttatcacactgcatcttaaaccttcctgtgagccccagaggaaacctcaagctctcacctagtagccccgccccaccccaccccaccctaaatcatccagctgaggccttcctgacccttcctcttggccatcactgtctgcctcacgcactccgtgccagccatgctactctttcttaatacaacttccctgtagcaacttgaggacctaggtagggtgtgtcccccctgccagggatgctcttcccacacaacattccaggactggctcatcatacagggtccagctaagtgtgtcttcctcagagaatgtccctggccattctattatctaaggtaattcccacccacgtagccccaccctctgccgtatctccagtctcctgaactcaggcaagtcactcggcttcaggatgttgtgtggaagtagctgcggcctcccccccacgtagggttgtgaggatccatggggttactataaggaagcttcgtctaccacctgggtggtactgagcactgtacacccttagtttctgggcttcatcagttatttgggtagtattaatgctgcctccatggtcactaaagtatttgaccacttgtccccatctagaggtgtctgttttctgtctcttcctttgggatttgggctcctggggaacaatggccttgaacaacatatgcaccgctgtggtttagtgtctggcctggtctgccatactctattgtagtagtcacttctgtattgttatgacaaaaccacccgaaagagacaacttaagggagaaaagacttagccacagtggctcttagttcagagggttttagccgggaaggcatgactgcacttagatcaccccagagcaggaagcagagagaaatcagaaccttgaaccaagctgtaatcttcaaaagcccagctccagtgactcactttctagtaggccattccctctggaacgctccacagcttccccaaagagcatccggcagctcgaaaacaaatgcctaaaacatgagcctgcggggatgcttcagaatcaaaccctagcaatacttaagtatctgtgaatgaatgtgcttataaatgagtaagcacagaaattaaggtgaccacattcaagccttgggttattattggaaaatattgtcaaatggtcctgtcatcagcatgattgtgagggcatagatttccattagaaaaggagccctggactgtggctgctcttggccactaagtccaagtattgggcgaaagcctggagatttggatgaacaacaaaacccctggtcctttttgatagaatgtctctcacctttcttgtggagcagccttatatacaaacttacaaaaaccccaggtcaaagggttcacaacaggatattgatcccagtggggtgaggtcaggcaaacaggaggtaccgggggttatgctggaaaacaactcttagagaccccgtgggggctgggttccaatactggactcctccatgggaaagtgtgcttctgtgaattctgggaactgctccttgagtgcttcagttgtgccaatcattagaaatgacgagctaaactgagttccagtcatgaagtctaaaccatgacaatgaacatactgaccctcaagagggacacgcccagatgcagaggagctgggacttggggtctgtggggccttctggtgaggaggttcggcatccactcttcttggaggaggaactacattagctccaagaagctcccagcatttgctcggtgaatggttttgtttcaagcccacttgccttgatgtgagtcgtctgtcacgatgattgacaggcccattttcacatttggtcatttttctttcgatccttaccacgttgtttgctaggattttctgaaactctccctatgtgaaggtgtgaagctgagggcgtgtggcaagctttgtgaggtggactacagtgtctcctacctggtgagggcttagcagggccacaaagcagggagtgaaaagccacagatgcaaggcaggaaagccacattgagcacaatgtctcagaagactgtggtggctcagatcacgggaagcgggagtgccaagcagtcttccctgcccccccatcctctttaagggatcacagcacaggctggcattgaggttaggcaagcgtccacaactaggtagataatcctaagggcagcctaaaaggatgttcagagagctccttaatctctgtgaatcagttttcttcccattttactttcttaacttccttcattttaaaggaaaaaaaaaaaaaatgaggcaggatctcctgttgcccaggctgaccatgaactgacagtgtagctgaggttagtctctccttgcttctaccgcccacgcgctaggattacaggctggtactaccatcctcagatgtctctgagttttttaatttgaaaaataaaattaaaaaatgaatttgtgaggactaactgagatggccctaaaccttacatttactgtgtgttcagcacctgagggtctgaagtatctaggactgtttgggagaaatacctgtggacatgttgtgagggactttttacaccgggctccttgagatgggaaggcccagcctcagtgtaagaaacaccattccacgggctggggtccagggactgaacgaaaaggggaaagcaagctgagggccatccatttctctctgctccctgcccatgggtgtgacatagccagcatctcaccctcctgctgtcgtgactaacctgccatgatggatgaccgtagcctaaaaccatgagcgaaataaaccccttgcttccttactttcacctttatcaggtgtttctgtcacacaaaagagaaaaacagctaacacaaatattccgtttttatatgataaacaagcaaaccaaggagccagtatttgtctacagcaggttagagtcaggtctgtcagcatagggcacagctggtcatgggccaggcctggagtagaagaaaatagagtttgggcccagaggttggggcatttgatgactgcgtgtaggatggccgggtgttgggcatggcagtgtaacgatggagaacagtgggtgcctgggacctgggactggttgggcttctggaggagacactgtctggggactgacagctgagtctgtcccaaccactgcacagctcagttctcgatttaaatctacccagagaaggactttaaagcatcagaccagacaaaagtttgtatttgtcttgtcttaaagacatgacttgtgtgtgtccagctcatagaacttggccaccagacaacatccacatcttcttatgttgggtggatcgaagagcagagttcatgggtagaagttaccagctcaggaaggtgagttcacagatgaagggaggggttttaagacgagaccattgtgaacgtggaagagaaggccacagaagaaagatggctgcttctgtatgaacacaggtgggcccggcgtcatcttgtgagagaaggaagtcaggacgttaggatttaaaaatggggccaggttatccttaaatggctgcagcacaaaaccttgagatcaaaagaattaaaagtactaacccttaaggaaatgccccatacctccagaatagactgacgactctccagtggtttcacagtgtgtgtgtgtaggcgagtggagagagtaatttggcagaaaggggaaaagttaacttgaaagaggaaatttgaggttagaaaaagcatgagggcgaatcactcgtgacaagtgcaaagagaaagagtgagattcaataaggaaccagagagacagagaccagggccagagtgcggccagggaggtcacagaagccatggtgcagagccctctgtgtgctcatcctgcccccccaagcacagtccatgcagcaggcaggtcaagacttgtctgtggagacagcggggaggaagagtctgaggtttggcctgaggctctctgagataaagcgtctatgttaattccttccgttgagggcactatagaggagatgatggtgctgggtggctttcccccaccgtggtgtgcatcgtctcctgggcagaggttcctgaacaggaggtctagatcaggagaaagctacctgaagcaatgagcaggcagggcagcatgggcgcccttctctgctcttgactggatgtggtgtgactagccgcttgagttcctgccttgacttccttggatgatgggatgtagtctggacgtggaagccaaataaaccctgtactcagttgctttttttttttttggtcagagtattttatagcagcaatagaaatgaagtttgaaaaatgaagaaggcagagaagggacagacaggacaaggtacaagggacacaaagagtaaagaacatagaagtcgtgacggagcagaggataaagagaaggaggcggctataaaagagtgggcggccggtgtgtattcaccaccgtgtgggctccagatacaaccctccccttcaatcacaagaaacccgaggtgtagatgagctccgtcttatacagatgaggaactgtgagttcagagaagtcaccgttaaccacacagctagtaaatacccgagccaggattagaaccgctgcctgcagccttagaaagcccacatcatttccatcagcagaacagctgccatggtagggggagcgctcagcctgggtgtgagggaatataaatggcatctccctcgaatggtggggcaaacatgcaaataaaccatgactagaaagatgaaaaagagaaatgagaaagggaggtccacggagtggtgcttggaccataccacctgtttttcctcaggcccaagaggtcgctctcaagagtctgagagataaagcaagtaggtgggtcagccaggctcacagggactcttctgcgggtgctggacatgcagtgcacacggctggagaatccctagcctgtcacgagagagtccaggtggtggatggtggttggctgcagtggacacttgggaatcggtggagagggagctaaggatgcattctgtagacacacgcctggcaggaagtgtggtggctgtgcagggagcccagagacgtggagggtacaaaaaacaaccgtgcacagctgggagggagaatttattatctctagtttgcataggaggaaaccgtggctcacagacttgaaggactcacctggggtcggtccaggcacctaggtttcagaaccatagcctaccatgctgttttcaccttctctcttttcccctctccccttccctcttcctctctcctcctccctttccttctctcccccatctctgacccccttccttttctgagttttcctctcttttctatcccattctccctttcttccttcacccctttcctcctttctccttctctggctaaactggagctcagtatacagcccaggctagccttatccttgagacagtccttctgcctcggacacttgagtgtatacctctacatcccactttatttttattttaaacaaaatgcatgtctggtggtaaaacttggtatcagaaaatgggaagtatttttgagcaaggccttttcatcctatttgagtggggtatttctgtttgcttattttgtttttgtttttacatttgttttgctcacttgtttctagtaaaagcaggtgcactttacaggtgacagtggcattcagctcaggtttgtgtctcgggtcatggtattgtgtccaggcacaggttcacatagagccttagccgtggattagctaactctggtgctgtttgtctgtctgtccctcccccttttcccttttagcatgagtctttggattggcagctttccaggatgcaacagtcagtgggaaatgctaagatctgcctgtgaaactcacccacagaggtttgtatgtggggcactgggtctccagccagcgtgctgtttgaggaggttgtgagaccttcagggggtccctggggagaaacccgtgaagtctacagcccactgtacttcctgtcctgtcctggcttcctgacccacctggatgtgagatggatctgaccaccatgctgtcctcaccatgataagccatattcctgtaaccacaaccctgtatccctgtaaccacagctggcctctcctccctaaagttggttgagccaggtctttttaccaatgagagaagagctgacacagaaggcaattcttaaatgactgacttagtttcattcataaagtcaacaggctgctgaggaatgtctccctgctgactctggagtctgggttctatcttgcagcatttgtgggtgatggaggggagtaagtttggaccacccagcatcatctccaagcccacaaaaattcacactggatatgcttattgctaccagtgccatggtgacaccccccctcagctgctcagattactaatttagattcttttaaggctgtctgggagaatgcccacacatccagatttctgttttagaatgactgccagctactagaaatcacagtcaagatgacttgacatcaatactgaatatctctgcatactttgtggctgtgtttatacctctgcttcgttccagagggctaaagcaggtatttctcagttattggtaaggtttcagttgctccagtgctggctgtgtaagtgtcagggcctgagctcagctctccagcacttgtgtaaaaagcccgatgcagcaatggcgatgcctcccagcactgggcatgtgcaggcaggagtgtccctggggcttgatggctggcctggaccatgtgcaagctataagcccagtgagaaaacctgtttttaaaaataaggtggagagtgctagaggcagaaaactcaacattgacctctggcctctaattgggaatgtccccagccacatatactggaatactctatgaacaccacacacacacacacacacacacacacacacacacacacacacacggcagagagtatattaaatgattaagtgactcagttattacagccacctgaatacacaggacagaaatgtgggatgctagggcaggaaaatcaaatgttgaagccctgtctgagctacagaaagaattcaagaccagcatcaacaccttgatgagaccctagctcaaaaaatattcagatttcttccttatcgtattagaggtgctaagtcgaatcgtgtgtgtgtgtgtgtgtgtgtgtgtgtgtgtgtgtgtgtgttcagtgtcttaaccactgcccaggttcttcctgagtgactgtctgtctcctgagatgatgggtactgtgttcattcctgtttggacatagtttatcaggatttaaataaagctttctgtgtggaaggacaccatgacattcattatccactccctgaattgtgataaagacctctgaaaatggcacccacactctgggtgtgatcgctaatacctccctgaatttttcttaatgaataagcttaacagaggagggatagacaagagcttagactatgagactggagtatcaatcagaagaaaatgttcagaaacttgaaaacgagccaatgaacaaaaggtgggaagaggctcttagaagacgcgttggccaagtctcatttgaagggtcagagtcaatgtcttctgaccactaagcccacagtgtctctattgtaacaactcaagtcttctgatgctgtaaaaaaaaaaagaaagaaaaacagacaacaaaaccttgtctttttttctgcttatgatctcaaatccaaataaataaacaaataaataataaatctcagattcaaggcaacaaagaaggtggatagattttgtgttaggcagaagacacatcaacacagcaacaggaaacagatacagagtgtggactggcagaggctgaagcctggctcaaccaaccctggacatgctcggtgaggaaaagagggagacatcttggctagagagcagaaccaggccgcaacgatggcagacacacctcagtggtgggctgagccctgggtttgaggaagagcagaaggacttttgacagtagcaaggactccccaagcctgactctgcctcaggtactcagtcactcaggcagaagggttcctagacctagaaacaatggttgtaaaatcagtgaactagattaaatagggcagactcaccaagcaaccaggccggaagcagggccagggagggagctttggtgttctgggctctgagaagaggggtgtgaagccccggtcaacatcccttggagccagtagtgcagagaaggggtactagccaggttctccatggttctgtcctcctggactgttccagaagctgttcacaggtgacttgtttcaagatgaaggtcccttctgtgcccattcagaaggcaaagggtgacatggaatgtagaggtgggcattgcccttgaggactccttcctaggggtcagggccccagatggatccaggatgtcagaggcagctactggctgaatattaaacaaatacacgaccaggtgcaatggtgcagtcccgtcatcctagcaggagtattattattcgtctgaggccagattatagtgagttcaaggccggactaggctatgtagtgagatactctcaaaaaggaaaggaaaagaaagaaagccaaagctacctctaaaagagtctgggaggtgacagtcagactgggtaagcaagtccctgtggtgatgtctgtccctaagcagagtccccaggggacacagcaactggaagccaaagctggatccaccccaggagggcatgggtattacagggagtgatccaggctgcagaggatggaaaggggaacagtcctttttgaaagaaaaaaaaaagccaacagcaaagggtatgccctggaccgtccaatgatattcaatatcagagcaaacaaacaaacaaaaatagttagggggtggagagattgtctaggtgaggttgagagccctggctgcttttgcagaggacaggggtttggttcacagcacccatggagcagctcccaacctcaggaggctccagatccagggaatctgatgccctcttctggcctcctcaggcacctgcatctctctctctctctctctctctctctctctctctccttctctctcttcctctctctctctcgtgaaatataaaaccaaatatatatattgagacagggtttttctgtgtacctttggagtctgtcctggcactccctctgcagaccaggctggcctcaaactcacagaaatcctcctgcctctgcctcccaagcactgagattacaggcatgagccaccactgtctggcccagatattattttttaaaaagagaaaagctggaaaaatgatatcttttggtttttaaaataaaaatgggctcttattttatatccctcatttgcccttgtccccacccacaatggcctttaaccttcaaataaggttccatttgtaaagccaacctcccctttcacagactgagtgataattacaataaacacacaaataacactcgtggggtaggtcccagcagaaagaactctgctgtcatcctagagaaactgtcagagcaaacccatctctcactcatgctgtcattggttttgaaaagtaatgcaagcagtggcgttcagcacacactcattggtgtgtggtttcctttattgggagagctggtctggtagctcctgaatcactttcttcctgttggaaacgtgtagcacccaatccccttagcaataacctccactgtccccacctgccagggtcacatcacccagcgctgtgacagggacctcacagagatctctgctgtcttcggcagcttgggtgggaagtttaaactcaggttagtcccatctcgatttgttcaacaacccctgatgattaacaggaaaactcagtgtgggagagatctgcacgggcctcctgggactttctacctcggtgacctccagcctcgtctgcttcccctcactgctgcctcccagactcatgagtcaacccctgctattcctgaacgcgtctgtgcatctgtccggcatctgtcccgtccctgccgcctggccttagctcctctacctggagctctctccagaggttacagcctctgggcacacttcagagcttctcggaatctatgcttaagtcctccccctctgtgtggcctccccagaccattctgagccccttgctcatctgcttcgtgtttttcttcttttcttgattcttgtcctcccgtgacataattcataattagcttattatacttgctacgttaaacctaaaccccaaggtcaatggtttgattcaagttcttagaccagtatctgtctaacacgttgtgggcctctggtccatgctctgtgatgaatggggaccgtgtaaacatgttcagtgtccattccttcatctgggtgtttactgtggatctgtgcatcacatctccagctggtcctcgtggtcaccctttcagttgtccttttccctgtgaccatctcatttggtcatgttgtttgtaaataatatcaaagccattaccatgttagcccatggaactacgctttgtttttacagtccactcttccctgtgtggccttgttaaagcttcccagacacgtgttgcttcctgtagtgacatcttgccttgccagtgaacttgtagtagtggccacaccctttgggcgtggtttcaggtgtggacagacaagacccctttaaagagaggaactgcagcccatgctctcnnnnnnnnnnnnnnnnnnnnnnnnnnnnnnnnnnnnnnactgcatctcctggagtaggaaggccttggcggttatttactctcatctgtgtgagtttccccccaataaaacacctgtttatcatttattctgtgtctggtgaactcatttaaaccctgctttcagcttccaggtcagccaagtcccaaactcttgagtgaactcacatttcaggttctatcttctgttaaactcggcacctttataataacgtaagcacagagcatctggtttgtttcctcgaggtacatcaccgtgtctttctcctctcaaagctcttcacatagtggaaggtcatgaagacagcctgtacaatctggtctgcacatgcaactgcttcagtgttaggagctttccccggatgtggtggtgtgcccctttaatctcagcatctgagagtgcatcttttcgagttcgaggccagcctggtctacatgctgagttccaggatagccagagctacagagggagaccctgtctcccctcaagaaaggctatttttaaagttcacttatatcctttgtggtagcatccccctttgataaaagtcagctacacattactaagcccacatttactgttcctccatcatttgtgaatgtacagacatgcaaactccccagaccttcctttaccaaatgaattctgtaaaccattctatccaaaacagctcttagcgtcagtgaatttgtcttagatcctgtgaaatccagtaaaaacacaattcttctctgtatgtggtttattgcttggcttatataaatgtgcaagcatgaagactggagtttggatcctgagagtgttgtgaccctgccgaaggtctacaagctccaaggcagaaatagggacccagggtacactggatagtagatagtaggattctgggtttaaaaagagacctggtttcaaagagagagcctgttcattaaattgagtggattgagaatactcatttctaacttctcatctctatgagcacaccccatttgtgcacatgtaccaacacacacaaacacaaagcatataacacacacacacacacacacacacacacacacacacacacacacacacaaggctttttgagacagggtcttgctatgtagctctggttggtctggattcacaaggctggccttgaactcacagaaatctatttgcctctaacgactgagccctaggattaaaggtctgttccatcatgcctggctcaaaaacatttcttgggcatattttttgtttgaaaaattctggacttccagttggggtccaggctgattatgccaattttttttgccataaaattaagaattatttagaaaaactctggcagatgatctaagctacctggaaccctcaaagtccatcaaccagaaggtggagaaaatatgtaacaaggttgtggtcacagcaagtcatccagcttgtgtgtgtcctgttaacctgcctcttccagatttctgcgattaatggagaagctgatgtcttagggagaatctggtgattcggggggaggagctggtatcttggggagaagctgatgtcttagggagaatctggtgatttggggagaatctggtatcttggggagaagctgatgtcttagggagaagctgatgtcttagggagaagctgatgtctcagtgaatgttgtgtgttttcactgccagccactgctttgtcctagatgtccacatcgattatttttggttttgtccttggggcttgaggcatttaatcatctagggtacaatataatacttaattgtccccatgcttcacacagtagtggcatacaaacagcagaggctgataaatacccatctgtgaccatgacggcccagaggcaggacacatggtactgggaggcagtattcctgccctgagtcgccttccagtcagaagaaaggtgttttccccatgcagtttcacaatccacaaaaggaaattgctctttgtcttcttatcaacctgggttgcagacttcataatttgcctttgtgtttgaaggtggcagctggccaggtgttcctgggcacagtgaagaagacgatgaaacgtgtttgcctgaggaatattcaggatctgtggagacaccccggagaggccctatggatgcttgtccagcttcagatagacagatgacctcccctccagggttttaagaatatcgtacagagctgggagatcgcatcaagatgatgaagttcttgtccagcagccataaagatctgagttggattcccagaacccatctttgaaaggtgggtgtggtaatgagcatttgccatttctgtggcgatgggaggggaagcgggcgcaggaggctccgggccaatgagagatgcatctcattcgaaaggtggaagatagctcaggagcacacccgaggttgtcctcgatttctgtgtgtgcaagcacgggcataggcacatgcatgtacacacacacacacacacacacacacacacacacacacacacacacacacacaggcacataggcacacacacataataacaaagactggctattggccaactatgatgagattcgagggtgattcctttgcatagtccatttaaagtcaagtggtttagttatcaaagctgtttacctgctccccacaagtgtccaaacccagaaatgaagcaatgaggaatcctggctggatgtaaccatcgacaccaccagcaaaggactgactgggacacaccaagagcctcagcctctgactctagtgtccctgcactctggagtgggggccagcaagctaccagccctgggcctgctgcctactttggaaagtcttgggtgtgagctaagaaagacttttacattttcaggagctaacatttcatgactgtaccagaaaagaaattcaaattccactacatataaagttttattttaatgtataatgccattcactgacacactgctaagaacaccactgtgtggagaccatctagccagagccagccatgcttcctatctggtcttctcctgggagctttgccactgattatctgcctaaaaacaccagcccaaacaacacactttcagctctggagggagcttataacaccgggtcatctggaactgaaccagagcatcagagtgactgcaccccagacagccgataaaagccggtagatcaagaccttggttatctaccagtgttgagaaataagatggttattgtaaactgttgcagctgtgaggggaaaggtatccttggagtcgggagccaaggaataccacagagccacaccacacaacagacctcacatgagacatttactgggagagctacaggaaggtgactgcctctgctcaggtgagaagcagcagggaactgagtgagaggcaggctttatatagggtttcttgggggtgggggtggagttttccagggtggagattggtggaatttctagtcctgagcttgaggcaagcccagggacaggtgagatttcaagctcaggaattggtgaattttcgagctcagggattggtgggtttttgaaacctggaagtgaatttagactttacaccctaacagttgtgtttgctgaaatggaagaaaaagaaacaaacttgtgtaagtataagattatagctttattagtctgttcattgaggtacccaatgagcatatcaagggctagaatattgaggcacagactgaatgcaggagaaagtacaacacagcttagcgttagctgtgattgggtcaaagatggcagtgctgctggcatttccctcacttgcctttgcttttgttccttctcctgttgtttatgttactcacaaattgaaagtcatgcttagagaaggttagaataaaccatcaggggcctgaaaaaaggaaactgtgggggacaggggtgtcactcagagtccctgataaaggccatctttatcctgtcctttaccacgtgtgtcctaaagaaaggaaagagcagacttcttacagcacctctccccccactaacccagggaaccagcaggtatggaagagtacctcttcattcaacaaatacaagcaatcttacttaccaggacttacacatccaagcaataacagtgctctgtccctcctccctccctcctctcctctccccctctagcagccctgctcctctgcccctccctatcctatccccatagctggaaaatgccgctgtttgtccattggaatccttgaaaagtgctcctactcattaccactgttgtctgaatgtttcaagatatataaggataactgcaatcctagccgtgggaagaccgaggcatggggattgccatgaatttgaggacagtttgagctacatggtgagtaacaggtctgccagagctaagtggcactctgtctcaaatcaggctcccacaccgcctggcctgcaggagctcccccttggctcccacacagcctgcaggagcgccctcttggcgcccactctcaacacttgtttactgtgctatagtctttgggaggcaccttgttacttttgtaaaggagccttgtaagtttcaggggcttcctgaggccctgtaaggttcccttagtcttaggagctgcgctccagcagtgtgtgtctcagaaggaagggacaacaacacacaacaaggtaaacagtgggttggcacaggaagtgaatcggaggacactaacaagttattatgaaacacccatagagacaggacagcgatttcagaatgggatagtggatgacccctcctgcccagtgttctcagcctctgtgctgatggcccagtgggacttacacacaccccatgaaggaactggcattgcattgcagagggctttcctcctgaatgctgagtaactaaatccagttcatatttattgagcaccaaccatgtcaggtgcaaggcgtgactgaagttctgggtttcagaagagggaacacggagggtgggggttcctgctactctgactgtgattcagagagacgagcaagaggaagacacacatgtatttcaaagagactctcgtgactcattaaattaaggacattgtgtaaaaatctctctgagaagagtgtgtaccctaagcatgggacggcgactaacataggacctaccatgtgggggtcaaatagggttttgaattaaattgatagttgtgaactgtagagaaatatggtatcactaaaaagattaaaaggcaaggagattgtgtgtatatatgtatatggtgtatatatgtgcatgtgtgtgtatgtttgcatgtacatgtgtgtatgcatgcatatgataaatgtgtgtatgtatagtgtgtatgcgtgtgtatgacacatgtgtgtgtatgtacagatgtgtggctgctcttggccactaagtccgagtattgggcgaaagcctggagatttggatgaaccacaagactcctggtcgttttctgagagaatgtctctcacctttcttgtggagcagccttatatacaaacttacaaaaaccccaggtcacagggttcacaacaggatattgatcccagtggggtgaggtcaggaaaacaggaggtgcctgtggttatactggaaaacaactcttagagaccccgtgggggctgggtgccaacatctcccccttctttatatataacaaaacagttatcaagtaagaactatagtgtgttactataactatctatcttcaactccatcaaagactatagaaggataggtctttgaagggtttgaagaatatctatatatctagaaaacctaactagtatcaacaaatgaagatccattccaatacaaagtatcatttctatgtcatattcctccttttttcttttaaaagtgattgactgtgaccactaccacttctaactgaccaaatttaaatgaaaacaaatatttggatcacctgggccactgcttcaggggatcctgccccatgaaaccataccagtctggaaggaatccacagctcttcaccctccatgggaaaaaaagcagaaatttccctcccaagtaacctgtactttgacgactgttgctccttccccagcaattaacgattcaaagacaacacaatagcattcttttgttaacaatcacacatttatgatcacacttcatacacacatgtgtggccacatcatacataccgaacatacatacatcttttgaacaaaactcacaaaggagaggaggtgtgggagggatggccatccttaccattgcttggcatcttggagggtcttgaggactgccgaagctttgtccattcctgtgtggtcttttgtagggcctgggtcttttctttatccacttggacatattttcctttctcatccgatgcaacagatgatgtggatggcttgcggtgatggctctgggaaaccagctgaaagtccagggctattggggatgaagacattgggttctgcacagggacatcactttctctggagtctttattggagatggaacggtagaggagctggagttaaaggtatggttgaccgtggacaaagacttggtgacaggtgtcttgaaagggagctcactgatgacagtgttgttactcaggtcaaggggtactggctttgcttttccgccaggcttgaggtggatattgaccgggggtgactggttctccttcctcggctggcaaagtgatggggcattgtgctcatgaggatgtcagaaaccgggtttgtgggcacatagttgtcatcagagctggcagtgtctgatagacccacgatagttttttctagagatttagcagaccagcaggcagtttcttcacctcgtgttggatacttgtagtcactgactggaggtctctgttgagggctgccccacagaggtgtctgtggtgctgtggtaggggagccatggctgactccactaggaggtctccaaattaatgatatcaaacacaaaccacttttggagctcttgtttgttgaaggtcagggttcttccaagcatagtgccccaacttttcctcaggaggcaatttctctagccagtctgtgcacaccacatcattgctggctaactagagcccacagcaggctcgagtggacaaaagcatgggctgctgggtcagctggctgctggtgggtagctcatggaggagggattccttagtggcagatttcctacatttctttaaattttcttagcattattacttaatttaaagttaaaattaaatcttactagtaccttgtctctttaaactttatctgtgtgattgactatgatctctgttccaatctaactctcttaggagttgaggcaccccttttccagtgcctttacaatctaactctcttaagagttgaggcaccacttttccagtgtctttgcagtccaactctctcaggaggtgaggcacccccttttccagtgcctttacaatccaactctcttaggagttgaggaaccccttttccagtgcctttagaatctaactctcttaggagttgaggcaccccttttccagtgcctttacaatctaactctctcaggagttgaggcaccccttttccagtgcctttacaatccaactctcttaggagttgaggtacctattttctagtaccttttgcaatccaccctcacaactccttacttgctttccagccttctgagggtgatctctcagggtcccctttctttcccgatcttggtgaaacctccatttgtggctgctcttggccactaagtccgagtattgggcaaaagcctggagatttggatgaaccacaagactcctggtccttttctgagagaatgtctcccacctttattgtggagcagccttatatacaaacttacaaaaaccccaggtcaaagggttcacaacaggatattgatcccagtggggtgaggtcaggaaaacaggaggtaccaggggttatgctggaaaacaactcttagggaccccgtggggcctaggtcccaacacagatgtatgtgtgtgtgtgtatgacatatgtgtgtatgtatgtacagatgtatgcatgtgtgtgtgacatatgtgtgtatatatgtgtgcatatatgatgtatatttgtacaggtgtctatgtatatgatgtatatgtaagcatgtgtttgtatgatgtgtatgtgtgtatgtatacatgtggtgatatgttgtttatgatttattaaagccactggagatgaaaatagcaaagcagacatactagttagctatagaagccaggcagtggtggccacacctttaatcccaccacttgggatggagaggcagatggatctctgttggttgaaggccacactgaactacacaaaactgatccagtcctaaagagaaacagctcacacaaagatgatctcagcacttgggatcacatgcctttaaccccagcactagggaggtataaaaagcaaagggtctcgtgtggagattgattctccagccacactgaggagaggcagcagtctgaggctcaaggagacaggatcagccccttcagcctgagttagaggtgagagctagtggccggctgctttgcttctctgatcttcccttgaagcttgaaccccaatgagtctctgggtactttatttttcatttatacgtgtatatttgtgtatgaatagatgatatatgtgtgtataggtgtctatgtatatgtgtatgtatgtatataaactccatttactaatcactacacaaaaaatcttgtcattcatttgaagagaaaatttactttgataacagggcttttgaaaatgaaaaaatatggaaaaactttcagaagaaaattatggtttattagagtcctggatccaaaacatggttttagaaaaatggaacacacctaactaccaatgagcacaggggacggtcacgtcagacaccttcatgaagaggcatgtttccaaacattcagatctgtgtttatggtcaggctcctacagggagccatcactcttgacccttgtgcttctctgagagggtaggaactttaagccagaggacctggtggcctggtgggtttgagcaggctgggagctgtcagccactcctgtgggaagagtccctgtgttcccagcaggtgggtactgtgagtgctcacacttggaatacaagtgcactcttggcatttggttgacaagaaagacaactggacaacagatgggtcaggctagaagacccactggcctttcatctcctaggaactgactgctcttaagtgacttggggtggtgtcagcagacctgtgtcctgggtttgctctttgaaccaaggttttcctgtgtactgcacgtcagccttgaacatactatagtagttttattttttgatttttaaaggaagaaaagatttctaaaaagaaatacccatgttattgaggcactgtcaaaatagctcagtcacagactcagcttaggatgaattggggaaagaaaatatagtagatatatacaatggcatattatttagctatagagaggaatgtaaatatgcattttggaaaaaaatgttgggattggagtccaccattgtaagtaaacataagtcagactcagaaacataaatatcacagttttatcgtgtatcaattctagactctctctctctctctctctctctctctctctctctctctgtgtgtgtgtgtgtgtgtgtgtgtgtgtgtgtgtgtgtgtggaaagtagaaatgagtttttccggcagagagactggaggagggagatgacggagaggaatcagaggatgaggacaggggatctggtgtaatcaaatgaaagcatctttgttgaactcatcaccatcgacaacgagtgtaagctgatgaaaagattgtgggccttttacagatatttaaggtaatgctgatcatctaagagcaaatatctaccaagcaaccctctggagtccagaggaaatgtctgagatgcctgaaaagcatcccagtatgcagcaggcctgtctctaattttgaaactctcaaaggatcaattctttctagtaaattttcatatctgtctttatgtaaccagcttccacaaacagaagtctctcaggtaatacattattgttgaccattgaaattgcctgaatttagactaatgacagtcagccatcatggggagtttgacacaaatacttaacattttcctgactttaccgttttgcctgaggaagattgtggaatgttgcagaaggaattcagaggactaagaaagcttagtgtttagcctttaagttcactatgggctttttgaagaccttaaaacacatgagtcaagtttttcccagtaagaaagaattttctaaatattttcaccatgaagctgtcaaggactatgttggagaattcatagagtatttttttttcattcacagtaaagagagggtaggcctccctgaagggcagctgagctgtgagagcgactcctgagagccaaggctgaagcctgtcccagagtctggggacaccgaagccctcactgctcccctgtactgaggggactcagtaaggagggattgtgatgctgctccatgttcttgctgctgcactgcctgctgaggctggccctggactgtctgcactggcaaagctccatgtaaatccaagatggagtgacagattggcatggcgcatgcgtggccgcaaggtgggaagagagagaacagtagtttgtgtgttaatcttaccggataaggataagaccactaccacaatttaaagccaaatttgaagcaagctctaattaaacactggccaggtggttgggctctggccctgtccatctctgggtttccagaaaatggacctaaatcaagttttatagtggctggacctccaatccagcctacatccaatcagaggtgaacacacatctgacctaattcctgcctgcgaacctcccacccacaagtgatcaaacacatccagtgcagactggtccaacaaatgtgtttaggggcgaggaaacatgtgacctcttatctctgtaaacagcctccagcatttcaggagctatctttccttgagcaaggggcttgtagaccagagtcatttttgttacatggattccttaggcatagtaattaaaacttaaaatgtaactttgtctctcacacactagactagtgtgatgccctttggaggggttccaggaataaagggatggggtctgtgtagagaaacaacttttgaatgtctcagtatttgggcaaaagctgagacctctaagaatcgatggcaatgaggggcacgatgaattcctgcagatgaaagagggcctacagtgcttgccccagcttttgtgtgtgtgtgtgtgtgtgtgtgtatgtgtgtgtgtgtgtgtgtgagagagagagagagagagagagagagagagagtgtgtgtgtgtgtgtgtgtgtgtgtgtgtgtgcatgtgtattgggtatgagcatgtgtgaacatgtgtggaggccagaggccaatgttgaggtcctcctctgtcactctccactttattttttgagataaggtctctcactgaacctggagctcactgattcatctaggctgctggccagtgagtccaggatcctcttgtctctgcctccgaaggcctgggattacaggcacctgacactgtgcctggctttttatgtgggggctgggcatctgaactaaggttttcatacttatgaggcaagcattttaccaactgagcctctggcattgttgggacccagcctcactgggtctctaagagttgttttcagcataaccacaggtaccgcctgttttcctgacctcacatcactagcatcaatatcctgttgtgaatccttcacctggggcttttgtaagtttgatataaagctgctccacgataaaggtgagagagacattctctcagaaaaccaaccaggagtcttgtcgttcatccaaatctccaggctttcgcccaatactcagacttagtggtggccaagagcagccacatggcttggcctacataactgcatctatttgtgtgtttgactgtgtatagtgtgaatggacatttgcccctactgtgtgtgtaaagacagaaacttggtgaggatgaactagggtgggttaatctcactttctcagttccaatcttgtacagagctgatctaagaaactcatcttcaaatgcatacattaattccaattgccctaattaggaactgtcctgagccattaatgaaccagcttccttccctgacttcaaagcaggaactttggaacttgtgctattctgagtctccttgtgtttagtgagagggaaacaagtaggttgattagcagactggattgctttcagagcagcgaggcactaggaaaacatctacagaggcatctcagccacggcttcacctcttgttccttaattagaccccatcattactctaatttccccctgtggtttatgatttgctgactccaaataatctagaggaaatctgctccgatgcagaacccagttggttttgctttagaattcattgaatatgtacttattgagaaagttcctctttccatttgggagtctttgttccattcttaatcttaactacaagccaaatagggagagtcggggagcaacatctttgccctttcagtaatcgaatcaataaggagagggagtgcgagtcatctgttaaacgtggtgttcagttctgcttgtaacaccgaaaacatggagtgtcaccaaacgtgggaactccacaagcaggaattgttaatccctgttttacagatgcagaaactaagacatggggtaagttacttgggcagaaaccatgttaagcaatggagatgtggttcaagtgttctgggttagctctctagatcctctgaacaacagtacaattacagttaacccttctgggttttgttttgtttgttttgtttttggagacaaggtttctctgtgtacccttggctgttctggaactttcttgttgtggtgtattattttaactgggcaaagatgtgttacatttgtttgtgctgcagaatattgtgtcaaggtgtgttacatttgtttatgctttatttgtttaatgatgtaaggatgtgtttaattgtgtaacaatgtgttgtatttgtttcaccatgcctgcctaaggcacctgattggtctaataaagagttgaacagccactagcgaggcagagaaaggatagacagggctggcagacagagagaataaataagaggagaaatctaggctcaggagaggaaagagaggagagagaagaaggaggagagggacacacctggggccagaagccagacagccagacagtagaagcagtcaaagtaagacatacataaggaaagaaaagtacaaagccccaaggccaaaggtagataaaaagaacaggttaatttcagttagaagagctagaaatgaggctaaggtaggtggagcattcatagtaagaggtctccacgtcttcatctgggagctggctgggggcctaaaagaaagcctactacgctgcctgactttgcctcccaagtgctggaattagaggtgtcaccatcgccaccgcccctcccccaccgcctgcctcagttagccctcctctgtcgagtcccgtgaaccatgctgttgtcgttgctgtcacttctctctgggtaccgttcatgctctgattctgcatgcattttagctggttcccgttggcagctgctgttgtgacccctggggtttgtgccactgactggatgtacacatctgtgatgtctagacacttgctcacacttagacaacgagatgggatgggagaactgtaggtagggtgacttccagcttccatgagggaagcttcgtgctgggacatgaagtgtcagcttctttatttttgatgatttttagagttagaaacagagcagcaggtttcattgtgactttgttcatgctgtaattcatggcgctttcacaatatgaattcagacacctcacttgctcttcaaggacttgcatagtttttaattaccttagagtaaagttcaagtttcttacggtgaacctttacggtccttgttggactctaccttaaggtaataccaatataggaagagagaccgacagaatagatgttctaatggaggaaggaggggcagggatgggggtttgtgtatgtatgtgtgtgtatgtatgtgtgtgtgtatgtatgtgtgtatgtatgtatatatatatatatatgtgtgtgtgtgtgtttgtgttatgtaatgtatgtgtgtatacatgtgtgtatatatatgtatgtatgtaatgtatacacacacacatatatatatcattgtggtttgttcttattcatccccccctgtggtgatattttgtttatgatctaacaaataaagcttgcctgaagatcagagtgcaaagccagccacactagttagccatagaggccaggcagtggtggccacacctttaattccagcacaagggagacagaggcagatggatctctgttagttcaaggccaccctgggctacatgaaattgatccagtctgagagagaaacagagccaattggtggtggctcacacctttaatcccagtacttagggttacatgcctttaatccccgcactaaggaggtagagacaggaagggatatggctgggcagagataggaatgtaaggcagggcagtcactccgaggacaggatcccccttggtctgagcactggtagaggtaagaactccagtggctggccactcagcttctctgatccgtcagctttcacccctgatagctgactcccagtttttattattaagaccaaagagaattcatgttacaccccccccattcttccactcttcaacgatgcaggaccatttccaaactcattcctcttaaaactgcagatgcagagccgggtgcctccctggtgctccccttagagcccttctctttggggctccccaggccccttccctgccaggatgctcttgctctgatagcacctatagtaccctggtgcctgattacttcccctaaatttgttccaaggttttctctccttgaggccatttctatagggtctgggggtgtacacaaacatatgcttgcttgctgtactggaagcctgttgggacccagcccccatggggtctctaagagttgttttccagcataaccacaggtacctcctgttttcctgacctcaccccactagcatcaatatcctgttatgaatccttcacctggggtttttgtaagtttgtatattaaggctgctgcacattctctcagaaaaccaaccaggcatcttgtcgttcatccaaatctccaggctttcgccggatactcagacttagctgtggtgcagtcagccacggaagcccatgtccttctcttgggaagttacttcaaacattgatggataaggtgctctatcttagaatcttatattctaatgactctggaaataaaatcccagggcttttatttcttctgttactatgctgactgtggcttctgactgtgggccattaatctaaatgatgtcctccaggatggatgaaaagacgatgacttgtttaaataatcccacagagcacatagacatgggacatctcagatacagaagtggcagagctgagcacttggcatttgtgggttaaacttacaggtttctattggagcatcttgtctagaagacgcagggagtctgtggctgaaagcgttgtatgtgtgtgggatatgatccccatgaaaataaatgtgccttggttacagcctagtaaatacaaaataaaaatgtatcagcaggacttggtgtggtagctgcggaaaatgccaggcattggctgaggctgaatgcagacttccagggctaccttagtacacacacagtgatctctaagtatcagtttgcttatatattggttgcttttatagctgtacttaaactgcaaatactgatcccattttcctgtgatttttcatggatggctttatttatttatttcttgacagtaaatgacatacacagaaagtgtgccatttggtcagctctgtgtgtgtgtgtgtgtgtgtgtgtgtgtgtgtgtgtgtgtttgtgtgtgtgtgtgtgtatgcttgcttgtttgttgagtgtgcctgtctgagtgtgcatggaagccagaaaggtccaggtattctgtcattatccactgtattgccttttgatgggtcctctcactgggtctcaagtaagagtggcagccagcaagccccaaccactcccaacattgagtttgtaggtgcagttagtcatacccagcttttacatgggtgccggggatttgaactcaggtcttcatgctggtgcagcagtttgctctaaccactaagccttcgctccagtccctgccctgtctttgtagagttagctgttctgatgcaaggagtggtttcccactgtggtttcaatttacgtttctgtacaatgggataggaaacatttttcagctcttgactggccatctgttttctttcacaaaggttctgtccaaaccatttgcttattttcattggatcactttttttaaaattgctgaatttgagaattctttgtatatttttggtctaggttctttatcattttaggattttttacaagccccctctcccagtctgtgagttctctttcactctcactgtctagttggtcttatgtatttatgggcatggctcatgggaaattttattttatttttttaaaattttctttttgaaaagtttttttttttttttggggggggagtaggagtgcactatgtgaccctggatgacctggaactcactctgtaaaacagactggcttcaaattcccagaggtgggcccacctctgcctcctgagctcggggattaaagacctgcatagctacactaccatcgctacgtttctaaacagtacatgtcagcactcagctagatagaaaagctgagttggtgccaaaataatagctcaataaacattttaaagagacagtttgcttgaactgctagtccacaatgggaaattggggtatatataatccacagagattatttttgaaattaaagattgcaaaataaaactaataattttagtaaatatattatattgtaattgtaaagcttatttttttttttaaatttctcagacaaaaccaattcagatctggaaaccctttgagcattctctctctctctgtctctctgtctctctgtctctgtctctctctctctctctctctctctctctctctctctctctccctctccatttgtttttgttttgtggtctcccactctagccatgagcctccacacacactcagctccgcttagctgtctcaatctgaattattgttatgtaagcctgtggtttgtcatatggtagaagagctacagtcactggggggttcctagaacgtctgattttgtgactcacaaatgcatggggaagagattctgggtgacagtcttaaactttttacaagactaacttcttatatatgcagtcacagaattaagacagatgaaatcaggctggtctgccgcctgtgtctaaactggaactgagacctgcttgtggcccttttgagcccgctgatgcagtaagttcagcactaaaactatgtccccagggctggggagctggctcagtgagtacagtgcccgagagcatgaagatcagagttcgtatcccagcacccatgtgcatgatgagtgagcacagccttccacctgtaaccccagctcaggggacaccctgagtactcacctgtctagaccagcagaattggagagctgtgcttcaagtgagagactctgcctcaacagggaaagtaacagagaaaggcactcggcacagcctgtggcccccacacatcatgagtgaacacacacacacacacacacacacacacacacacacacacacacacacgtgcataaagcaacacacatgagcatgcatgtacacaagcgtgcacaccacatatacatagaaaacaaaggcaataacaaaactcttcagtttctgatactgtcatcctaattacttgtccaggttaatagcagtcattcctctatacatagttggttttcatggtttggattctttcaaagtcactaacttcagcaccttgtcctgtgtagcggaaacagcaccctaaaattgttaagtactcaggaatggtttttcccttctcttgttctcaattctcctgctctgtttactccaccggttcactgctggatcgtcatggtggcctcctagtgggtgtcactgcctcctttcttcccttctataagggacccttgttcccttatagaaggatccttgtatataggacccttgttcatgctgcagatcatggaattttcacaacattaatccagatgcttcacttgctcttcaaggacttgcatagtttttatcaccttaagagtcaagtccaagtttctcactgtgaactttcaaggtcctccttggactctaccttaaggtaataccaacgtagggagacaggctggcagattagaccttggaatggaggaaggaggatcaggcatggggttaagtggaacgcaattaatgcggatctcaatggagtcacaactagtttgaaaaacagatggtttattaggaagtactcacgcgacagggccagtgctgtacagccaggcaagagagagaacagagagcctcatgtgtgcatccctcatctttaaagccttgccatgtcactctgaccacgcccaagtgtgcttggtcagcgtcacctgtgccagccctcaagtgggagtggtcagcatttccccctacaatgggggtttgcatgtgatttgctttatgaaatgcagtgccatgtatgacaaatataagtaatcttaaaaagtttttaaaatgttgggttgtggtaaggaccaaagagaagacatcaagaaaatgacatcagaaaaatggcactttgctttaatgaaccatcttactgttggtgttccctttagtcttttagtgagcccctgggaattactggataccagaatcccacttttaatggcttgttactcatcaagccctggatgtgggattggttgatgtgtggttccaagcactcagaatcctgatgggccactggggattttgattttgcctttatctacaaccatcaaagaagctcagctttgaatagttatgctaccccatggccacagtcaaggtcaccctgggagggactggaaagctgagagaagcccttagagacctcatctggtttatactcactaagagtccaagaaatccctggaagtgtaagtcagagaagctaggccctggagctaggtccccagattgtaagcactgtaagtaccttggactcttcatgtatcaaccagaaggcagagagtggagaatgctggttctggaagcctcgcctctagatatgtcacccacactcagggtggcctcctcttcactaatcttctctgaaacatcctcatggacacaccgggaaatgtgtctcctgggtagattccaaatatagtcaagttgacataaccatcggaccacccacccaattcttcatttctctgtctatactttctgttttgtacctgtgatatccaccgtcactgagagcgagagagggcacctgtatgcttggattagatttgcgaatgctagcaaagagtaagaaccctagctccagagtgaggcaagttaaggactgtgggtccttggttatggaataattgtgaaggtataggctgacatccagcttgagtggacaggtgtgaggatggaggggaaattagaaaaaaaaaacattaagaacaaattctgaactccttggttaaaatttgggggtgtccttcagtgtaaagccactgttaagtagtctgtgttccattacacaacctcccacacatgtttgtgcacaagcaaccctaattaaacttggggtaacaaaaacacaacacaaacaacagtgctggaaagaggaggaatccagaggaaacaaggtccaatgggagtgtgatgagagagggtcatggagaatgaaaatgagcaaaatacattaaatacacatacgacattgtcaaagaatattaaaagcgtaagaacagcgatacagggcagggctggtacagggaacagcaaaatggaagcgagtccagttcagtgtagctgggatttttcagcacagacccaggacattgggagatgtctcccacccgctggctggcatgtgccactcaggtctctagtaagcctggcccctgctgtgttctccctgagtctggtatgggatgaaaacctgaatgtcttctgagacattctgaagacctgtaaagatgatagtggagtagctgtctgggccagtttaattcatccgcccatcagactcacagctcttctgggtgagaggtacagcaataactgtatctgtcaaaggagctcagagagagagagccagatcacaggtaccaccaatgaccagacagcggagatggggtgaaagggatttggtttctccccatggctggagctccttcacagtgatcagttggctctttctgaatacggagtagggacccatctgcaagaggaggattccagagcaggtgggtcgtttccccaaaggcctgctgctctccacatgtgcttaggggaccttattcccaaacacattggtcaacaaaagtcctgcaagcgtgttgccagtagctatacagatccagggtcagaaactttcatgtcattgtgcagccttgggctcaaatgcctccaaaggggccttgcgaaattgtgctagtgccatggtcagtagttattaaaaacaattgtaaaaagccatgcttagcgaaggaggcatctgagccagttcagtcatccagctgttgtgccctgccatgctcacacagacatgtgcaatgttgtgtgtgttttcctgatagtgttcaccacttaggcattgaaacctctaaataccagattgttttagcaggcatgtgtgcacgtgtagctttagtaaaaatacccacttctgctgctgctattttcagtgagctgggtcctgtgggtcccacctagaggctgtgtgctctgtacttctctggtctcccccaagaccacctcactctcttatagcctgatttggaatgagagaacaggaagattaaaaggcagagctggcagaagctgatgaacttgtgtttcttttctttctccagtttcttcctggaggtgtgaacaaatcatgaaactgctgagaagcaaggcggtgtgaaggaggtaggccacacgacgggtcctgagagactcagaatctacaccgttagccgggaatccaagccggaggtgatgaacattcgttcacacagccgggcacatcacagcgagattcctattcttgaaacaacgaacagagtgtcccgacacctctagacattaggatgctcacagagcctcgtcaggagagacaaccaggatcaggactctcatgtcacctcccacgctactcccagcagtttggtcctgcaaaatgacacacagagctcatgctccaaggtgtgagctcaaggaggtaagtaggaagcacacctcctctccacgggaaagtagatgtgactgacaatttatatttaagtagttacactctgatacaattcctgggatactggcagtgttggtgaaagtagatccaattgacaatttaaactcaagtagttatacttggatacaattcctgggatactggcaatgttggtgaaagtagattggatgggcaatttaaactcaagtagttacaattcctgggatactggcaatattattttaggatgtgcagaaacttgaaaggtttgtgaggccttgggggaagaaagaggaagaaacaagacatttatagtttagctgactcccccagcatctcccacatgggtagggactcaacagtcactgaaaaacccaagcacggctttatgtgcaagcgtccagtaggtgtttgcatggacacaacaagtgaaaacaaaaaacctggcgagctgcttaagtgtgtgttcctcaggaacgaaaatagtaacatttccaagaaggtgaactgactcatgcctgtgtgaaatctggcactttagaggtcgaaccaggaaggtttctatgagttccagctcagcctactgaaaaggaacataaccgtacacaagatatgcttattgatggtatagtctaaatgagaacaacttacatgagaagccgataaccagattggcactccaagaagtccagtctcagacgcactccaagacctggcctgaaccccgaaagagagcaagagcctcttcctcagttcttttatcccatcccagacccagcacagaatctttggtggggttcacacttgaactgagtgttcccatggtctcctatggtgaagaactcgaggtctggagagctctctccctttagagtctgcttgtcttcactttcccctgtctaagaagctgttctgagtggcagggctcccgcccccgggggatcggtcctttgtctatcagaactctgtgttgtcttctcctatcacagcaaacatggtggaagagcattatggctagagttgaggactttctcactgctggaggggtgagaattggtttacaattgtggccctttcattcagtcttgtttttaagaccaggtaatactatagttgtgttttctcgctgatggctcaaaatagggagtgctgtgaaaaacactagaaaaaggcagtttcttttggaaatgcaagtcagtttataccaggcagtgagatggcagtgttatctaaaagcttttgactgagaaagtggagacactcactaaagagcttggtgtagttgcttttgtactttgtcaggcatttgagcccaacttgtccagtgtggcaatcacctttgtccagaaaattgatcacctgatagaaacctgtaaactaaatccagagtgccagtgtctaccattgggatggttatgagaaggtcatgtggggtgattttgtggaaacagactcaaaagctgacccctcggatgcagaatgtagctgtacaaggccacctgtcccttcaagactttgaaaggtatgtccctgcacagggtggctgttgctcaagaatttttaaaattacattttaagaattgcatttaaatgctaacagccccatcatttttctttttttttatttttaaaatagatttgtgctaatttttacaaattcattgttgatgagtgtttgtctgtatgtgtatctgtatactgtggacatgcctgggtacctgtaggggcctgaagagtatgtaagatcccctggaacacaggggagccacatctgattgcttggaaccaaactctggtcttctgcaagagcactaagtgctcttaagcactgagccatctctccagaccccattatatttcagatattttcaaagaatagacttaacaggagggatggctgacagttgtctagcagtaaacaggagaggccttgagtacagtgtaggctgagctgatttgcagccagcactgacatttgctagtagtgaggtcatgggaaattgatgatctgaagcactgggtcattcgttcgttcattcattcattcattcattcattcattcattcattccagcagccagtcatttgatcagtcgcagtagaaagactgcctgagagcttgaggtcaaagcatttgggcatcggggatgaattcagcatttccattttaaatctctgctctaggttaatgatcaccattaaaaaaaaaagccacattaataattatcaaaattcctcaagagaaattctgaaggtttttgaatatctgtaatcttagcaagtaaatatctgacttccacaagtcatccattttagaggctctggtgctgggcatggctaattcctttccttcccttccctcctcctctccctcccccctcccctcctccctcagcctcattccccctccttttctcctccctcctccctccttcctctctccctccgtttctatggagacatgaacaaatacctgctcatctcagacagggaaccaataacagccaaagtaatgaaaccatgaaagtacagttggttggccagtgagtgtgttggggtcacttacaggagcaggaatcacccaaaggtagctgctccagagtgcagggcacgggctgcagggcctccacaggtagaagctgtcttttccagatagctctgcccttcctgctnnnnnnnnnnnnnnnnnnnnnnnnnnnnnnnnnnnnnnnnnnncatttttactgcttatatacatttgatggtggtggtggtggggggtgttgaagaatctggtcagttttagagatttctggaagcctttgagctgtttacttccagaagccttatttatttattttatgagctcccctgctataggcagagtttctgtgtctccacggcccttcccaaatagtcattggaagacttattaaaatataaatgctcagccgataggtcagccttgttactagctaactcttacattctaaattaacccatatttcgtgtctatcctctgccaagaggtggaggtgacttcttgcaacataggcacgttcagcttggttctctctgcttctgcctgagactctccagactctgtctatcttcccagtacctgcaggatggagattattgccaaacaccttcatgtctgtctgtctgtctccctcctccctccctccctccatccatccctcacgtcctcacccattcccttctttcctgtcctctgactgagggtgatctgcaggcctaaccatgtatcagaattaccaggaagttctttgggaagtacacactttcctatcccctttcctgaatcaggaccaccagggaagggtcccaacccagacacaggcactaaagcgcctggtgccccgaagccgaagcagggatcggagtctgagctcatcgtcctgcagagaagtttgcctcttctcatgatgcttcctcatgaaaacaacagcttagcagctggctctgtgtgtcttctcaggccctacacagcccagctacctcctgccttagaatgggaaccttaaaactatgcaaatcatatatggagaaaactttgaaagaggtcagcaagtcagctgactgagaaggaacagtgaacaggaagcaggacttagaaaggggtgtggccctttgcctttgtggggtccagactgtgcttagcaggccttggtcaccaagctatgtccccagcaaggctaagtcagatccggccatgctgctttagtgcggaggttaaccttcactgtcacctccactagattcagaatgacagattgaggtacatccgtctgtccgtagatatggctgtgggggctttcccagagaggatgaaccaagcaagaaaaacccattctgaacacagtttgacacaaacccatgactcagggcctagaaagggggaaaggagagagctgggagnnnnnnnnnnnnnnnnnnnnnnttcctggggacacctccaccactcccaccaccacaatctgaaggagagagccctctaaggccttgagccaaaataagacttttgttccttgcgttgtttctgtattttattttttgtttgtttgctgtttttttttaaattttttttttaacttttttttggtaactgccattcaagacacacaaaagtgagtatgtctacacaacccttgaacttagatttgggcagaagtttagtaagcgagccaggctgctttgtagacacaaatacaccccagataccagtgtgctgattatgaaataggacctgaaatcccaaattgtaaatggtgtggggaggcagtggtacatacaagctctcccaaaggacactccagagggcgctgacttcagccacagttttttgttttgttttgttttgttttttgatgcttaaatactgtcaccagctgatggggaacgtactgtgtatgtttatcttattgattattgaataaaatactgtttggccaatgagacagcaagttaggactaggagtcaaagaggattctgggaaatgtagtagataagtggtgatccaggcaggaagtgacatagcaaggagactcatatttaagcgaaggagaaacaggaagggctcctttttcccctccactcctgctccagcggcacgatgtgatccaccagcactgagggacgccaataaggcatcagataagtcttataaaatatatagatttatgatagttaagactgagctaacagatgaagaatcgtagtcattggccagcagctttgaacctaatacaagtttctgtgtattcatttgggcctaactcgggcgggcggctggcgtaaagctcacacgtggcggtggggctcaggcggcatttggcggaaagatttatcgtaacaaccagcctcctcccacaccattttttttttctctattagtctgtctcttatttcccattgacctgattcccacctgccacattgactggcattaagttatgggagagaacaccagtcatgggcagctggctcccaaaggaacagacgccccctccactgtagcatctcttcttatctaaagaggccatcttatacctcctgctccagcacacccttcacacacacaccccttgatcccagggtagtgggcagggtacccatgattttgtggttcgtcaagctgaggccccggttcttaggacataggtgctctatagatgatgccaagatggggtgcgttgtttcttgacacaaagagagagaggcaaaaaacagtgaccgcctctaacacacggtggataatactttagggtgaaatgtttgagacataagaattttctcctactgaattgggcaacatctagttcaatgttaccatgttagttctttttcattgttctgacctggcaaaagcaacttaagggaaaaagagtttggtttgtcttgtttgagggtgcagcctaccatagtggaaaagttatggaggcaggagtgggggacagctggtcacactgtgtccggtaaggaagcagagggaatgtggtactcagcccctccccatgtcttctttttattctatctgagcccccaatccacagagttcaggattccacattcagagtggattctttcttcctgctcagttaaagccctcacaggcatacctgaagctgtgtatcctaggagattctaaatttagtcaggttgacaatgaagattaactatcaaagttagattatcaaaccatttcttttgttgtgtgattttgaggtggggtttcatatagccctgactggccaggaacttgctatgtagctggggctggccttgaactccttattctcatgcctccgtcttccaagttctggaagtacaagagtatgccaccatgacaaaaaaatgtttttgcagtgctagtaatcaataacttccacaatataacttgaaataaactatgcaaatcatatatggagaaaactttccattttaatgccaacgtcacaaagcacactgaagaatcttataaataaaaaggcagagggtgggggggacagcatcaagatgacagctagtaattactgatcacttacagtcgatcagttattgataccaggatgtgtcagcatttaaacctgcagccaaccttctgaggcaagcgttgtcactccacagtctcacagcgaggaaagcaaactgaggtgcaggtaggtgctccactcacaggcatggtaggtggggactgcggaggaggttggcaggtcacagaactgggggacagaaagagccagccctgccatggttagttgtagatccacagttagcaggaagagtgatagcggatagattggagttaagtgcaggcagcacacatgttaaagatgaccacagagccagtctttaaggtctttttatgttatgttactgtgtagaaaacctgattatcattcatccaaaatgtgctggtgaaatggttcctacagacaacaacagacagctaagatatgcagttcaaagatttccaagaaatgtttatattggaaatattagaatccagatttatatagaaaaaccaagtggttgttttgttttgtttgtttgtttgtttgtttgtttgtttgtttctgctgggctgtccttgtcagtgggaatcatattctattcttagtaccagcttttttgtctgttccttctggaaatcctcatggatctgtgtccctggtgagtgtggcagtgaccgggccatcgtgagtgggaacttggggagtgtaccgaggcccattgagtgagtgggtctctgccaaccgtagttagtctggaactctgagggggtagcgggaagttagacttggcagcgtcgaccaacctaggaataggcagcaccgtttatttattaacaccatttatttatttatttatttatttatttatttatttatttattaacaccatttatttatttattaacaccatttatttatttatttatttattaacaccatttatttatttatttatttatttaacaccatttatttattatttattatttattttgaataaagcttccgaatgctacaatgacctaacaaaaggaagcctaaactcccactcccaaacgggactatttctttcttagtggcttcacactagtctgtgtgaaggtatgaaaaaaagggactatctgggatcacccatctgttctgtgccttctggtggggaccagatctgtagctacctgtcatagcacatcactctcgctaacggtggctcttaactgttgctgggtgcaactgtgcatctctgtcaagagtcgtcagcaccctcagacacttagccacaaggtgaagacctacttcacttattattagtattgttattgttattattatcattattatttgtgtgtgcgcgcacgcgtgtgcatgatgtgtgggccacgtgtgaactcagatcatctcacccaacatgaataaaaggtgcctcagtgagaaaaaaaagttttatttttctttcctgttttcttctttttctgttccattttatttttttcctctgatcctctgctcacccgggctgcagaccaggcaagcccagccgcggcccaggcgcagccaccaccgttgggaacatggggcgcaagccgggccctggggcgcaagagcgagtggacgaggaggcgcggacctgctgtggctggcgttcccgctgctgctggcgctgctgcagctggctctgggcatagcggtgaccgtgctgggcttcctcatggcgagcatcagcccctccctgctagtcagagacactccgttctgggctggcatcattgtaagcatcaagtctgttctgcctaagcgccagcgggcatgccaagccgcgtggcggagtggagactaacccagctgcatgcgccccccaccccaccccagctgcacccctaactgcttggagactgactgtgggcacacttgggctccctccccagcgaggctggactcaggattcaggcattctcctgcctgaggcttctagctcctcccagggccctggcttgcaatctgctggagctggagaggcctgtggtcaccctgcacagtctcaaagacaagggcaggcccagccagcctcagtccggtccttgtccattccccaggcctcacgcctgtctgcctaagtagcacaaagtgaggttcaccaagggaatggcagggtaggaaaacctgagcctggagtagacacactagtttttgttaagctacagtgcctcctcgtaggcttccagaaacagctttctcaggcagggccccagaaggcaaagcacagccccaatccacacagtgtagggcggttgaagcttttctagctgctgcagaaatgtgtttgggactgtactgatgttcagggctttgagatggcctgtgaattcttcaaggtaaagtaggtgcggcttgctgaatacctacgatgtgcctgccctggtggggatcttcagtcctcaagttagagaagccaggctggacccacccgaggtcatgagctcagacagcattcagacagccaggccgcatccctgtagtcagattggggcttgctattttaataccatgttatctaaagccagtgctaaactctcagacacgtttttcagttgatccatgaaagagtgaggatcattacccctgtttggacacaaggaagcccacgaagataatgtaaaagacaccctcaagcccagaaggtaaaagcggcccagtcaagggagacggtgtcattactgttgatgaccacacaaggaaacctccaacataattttgtacggtacagaacttagagacacctgatacatatgcatgggtgcagatatttttaatttaagattattcgaactcacaaatctttaaagcgtaatttaaaaacatttaatttatgtcccgagaattcccttgaaattatcatgattggagttttctcagccaaatggttttaaaaataacttctcacttagacatactggatattttagtcaccttgatggctgtcaacatactctgggcggggagggggggatatctgtccttgaaggttaggcaaaaggaagagtaagggatgaaactggttttgagaactagcttttatatcaacttcaaggagaccagttccaaagcaatgaattagatagggggacaaaaccatgttttaatgtttaaggcatgacacagaaatcctgaaacttggagaaccaaaaggtgcatcaacgtttgctgttcctaatggcttcctggtcgtggcatggagaaccttacacacaccaacggactctctctttctcttgtttcttctttacagcctaggactcatagaaaatgcggccctgcttgaattctctctgaacagaggatctgggtagagttgagcagctagcacagatgtccccagcctactgagggagcatttaggatgcccgtggggggcatgtctcatctcagcaggatgagggctgtgggcagtgtgtcactgtctctcagacatagggaccctgtgcttgcctgaccacactgtctggttggtctcagggcattcttccagtctgtcaggaagggcgaggcaagaggcagacgatggagggcaggtgtgtaaacacctggtgttgggtccctgctcaaacattatttgctgaataactgtgggcaagttagtaaatgtctctaggtttcaattttggggtttgggggatggtgtgtgtgtgtgtgtattcatgtatgcaaacatatgtgtcagggagggcaggcacatacacctgtggaggtcagagggcaacactgtggtgccttcctcagtcactcaccacccctgtttttgagacactgaccccaaaactcaccaactgggctagagtggctagccaaggagccccctgggtctccctatctctgtggtgaggtcacagacacttgtagccacacctgtctttttacctgggctctgaactcaggtccatacgattgagcatcaggcactttaccctgagtcctctccccagccctggtttccagttctttattgacactacagtaagtcccagccctcgggccaccctgaggaatgaacatgtcaatacatgtgaagcccctgacacactgccaacccatagctgacagtcactgatggtggcactcttcaagagccatctccagggtggcagcagagtcctgaatcgctgtgtttcacaagtcagttagagccccaaaggaggtatccgtttgaccatctcatctttcccagccaagtcactgtttagcaatctcagcaatcagtatgatgttagcccaggacggcctgagaacctctgtagattgataaaaatgaatgtggaaggggcctctcccagggcccattttaggatgccgagtgattcgagtctggtatgtcccaggggatcctgagacattaccctgagcagaagaaggttcagtaccaaacccaaggctgaacagagccacacccacttccggaatgcaggctgaggctcccgctccgctcagtccgaagctgtgtgtgtgcatcattcttttatttactcaggctgcctcttggtgtaaggattggcttcggttttcagaccctgctgtcctattaacttgaggtttgggtgttggcatttccctggtacaactcggatatctgggtgaacccacacaggtggcttctccttgaccagagcctgtgtgtgacttgctcagcgacctcctcttacatagaaactaaagagaccctgggtgatttatgcacagagatttcagtccagtggcatggtgggagagcagcatggctattgtctgtccctccttcctctcctccattgtgagtctccatatctgtgactccactgtgcatttcagttacctacgctttctgtacgggaaagggagacagtgaatggagctttggtggagactgtgactccggctcggcgtcctttggagatggcagaggttgttagtgacaagatgaaaggtgatatctctgagaaaaaaaatggggctgctggcaaagcacccaggagagagacgttcgtcctcagtgccctcttttcctgtttgttgtttgaaccagattgccaatctagattttaatttcatgttcagttttcaagacagggcctaatgtaggaacttgacatagccaactctatgtagaagtctacgtagctggccttgaactccagattttactgcctctgcgtcccacatgtctaggtcatttcagatcttatgcccgtgaaggaaccgagactttgggaattcagtgagtgcatttctaattgagatgtcttgcctgtttaaactcaggcttatttttctctgtttagtaacatttgttaggggtgtctgcacgagtctaaaatcgtgttcctgcagctgggcaaggtctccaactgctgatggagtgagcccttatcacacctgagagtaatgaatagtgctcattaaaaaataacctacacccgggcggtggtgtcgcacgcctttaatcccagcacttgggaggcataggcaggcggatctctctgagtttgaggccagactgttctccagagagagtgccaggataggctccaaagctacacagagaaaccctgtctcaaaaaacaaacaaaaagtaacctacagcagtgtttctgaagcccttttacctctcagagagtccccagtggtgattcatttcctttggcatcaacgccccaaagtcaattccagcacttgctcttgcttctcacctcccctaaggactttgtgatgttcgtatatctaggacccagcaggtatctatattcaccaagtagatgaggctgatgagaacttactgtcctctccctgcctctgccttccgagtgctggaattgcaggtgggtgcagctatgccctgcctcctggtatgttctttagcttctctgcttgcctctcccgccatcatccctatgtcccatccgctggaatccaaactctgagatttgtgtcgtattaaccccattggagagtttaaggcaagggcttaagaggaaggcaattgtgtttcctgtattcagcatcagtcatgaaacccatcgtgtgactgtgtaatgattaaaagtcctatccggtattaataatgccggcatggcagtaacaataactgcatggcagtaatcccaacactcaggtggctgaggcaggaggattgcaagttccgggccaatctagacaacaccctgacaccctgtctcaaaacgtacgcacacacgcaaataatttcaacatttctttctaatttcaatttcaagttttctgagggattagaaatgcagatgtgttccgatgttccaaatctggttcagatttgacacaacggaagggaaaggtgactagctgttttaagggagaatttactgtgaaattggcaggtagatctagaacacgtagcaagtcaggctgaggtgtagttattacttaggattcacaactacaggaagctagacacatgatgtaactaaggaactctgccatcgtcgtgaaggccagaagagcacaaggtttggcactggttttcataaacctttcatcgagtcaggaagctaaaggtgctgccagtttcctcataggaattttgagatttgaaaaattaaatctggaagaatacttttagaaacacactgtgtaataatttattatttttcacattgggactttaatgtgtgtttccaaacccaacacagcacctcaggtaccactgggtgatagtttttattatgtgactgtcacagggttgttagaacgaaggaataataagtacagggctgattcggccgtggagcataaataacagataagtagtaagaaaataacttgatacctatgtgaaattctcacatcaaatataaaaattttaatgagtatatgaaaatcgcatggagtacttgaggatttcatgggagaagagaaggtgaggacacaacaaaatcttaagatgcccagaatggtgtggggaaagttctccctctgcatctagcttcactctagcccagagttcggggctaggcagtggagagtgctaaggacctaaagatgcttccttcaatattgagatggagccgatgctgacatatttttaaaacccttcacttgtggatataacccactcagaaatttacccagaagttagtgtctggaaacgcctctgagatgtccgtgtgaatcatctgagcttttggtgttttgtaagattaattctagtgcatagactttgggggaaactgtaggaaagggaagtcatgtgttatttaaccctccgaagcttagggctgctgtgtcccctaagatgtaatacatcacactgaagctgtgcctctctaacttgctgttatccagagtttctgtctggacttattcatgcccattttaaagtaatagaactttaagaggactctaaatgacaatagtgtgctgtcattgctgcattgtggctcagagctccaggagtattcagaaccctaattcatgatttccaagatgttttaaaagtggcttgaggctggagagaagacacagcttgctaatcttcagaggacaagagtttggtttgcagcactccagatccattggatccgatgacctcttctggcctcctcagggacctgtatatacatttgcatacatacacacacatataaaataataaaataaaccttagaaaagaaccaagtagtaataacaaccacaaaagagatgaattcacttgacttaattttaatttccccagctagaataaatgacttttgggggctgatacgatggagttgactccctgtgagggaagcaatagggtaaatctgtaattttcggtctagcctttcagatttatgctatgctgtccacttctcccttgctctgagaaaatgtctgggtactctcaccctcccccaccactacggcgccatccttgccatttctgttaagattgctgtctaattggccctgctctttggtgctgtgccccgggatagcacatcagcattaaaaggatgtatgcaggccatgccaaagatgccagcctgcaaatcttgatgtaatgtcaggacaagaatgagaattagccactggacttgagctaggtaccatttcattgaaaaatgcagttcattctgggagctgagcacatgtcaatctgaaatgctaaccataaaaaccagaaggcatacggagcccaatggcatcttgggatgtcataggctttttattttattgtattgccccagttttcatggtgtgtgtgtgtgtgtgtgtgtgtgtgtgtgtgtgtgtgtgtgagagagagagagagagagagagagagagatcatgccatacatgtgtgttagggtcagaggacaatttgggagaattagttctttcctcccaccatgtgggtcccaggaaccaaactcaagagcttttaccttttgacccatcttgctggccatgcttttttgtttgtgagacaaggtttcatatgtcccaggctggccttgaacttctgatcctcctgcttctaccttcccaattccagagtttaaatcccatgtgactacacctgaagagagtgacagtattgttcagtgactcataagcacatttcttgtctaattgctaaaggcctcagagtttcctagaacagccagtaaaaattctcagttggtgaaagcaagtacacagtgtgaatatgtggttgttcacactcatgtctgagggactcatttggaagaggtttctttttaaaaatctgattacatcatttaccctaatacctttccttcctgtaattcctcccatgacttcccttacatgctgtgaagagacaccatgactacaccaactcttacaaggaaagcatttaattgcactggctcacttagtttcagaggctcagtccattgtcatcatggcagcgagcatgagagatgtggtgctggaactgagagtgctacatctcgactcagagacaacaggaagtcgaccgactcacactgagagaaacttgagcaagagaactcaaagcccgcccccatagtgacacacttcctccaacaaggccacacctcctaatagtgccattgcctttgtgtgtggggggggggcattttctttcaaaccaccacagtgtgcatataaatatgcaaatacagcatgcctatcagtattcttgtctttgttcaaatcttgttcaggaagccatgttgttgaagtgtcatgggagatgcttcctgctcacttctaggagatgctatatattgcaacagatttcctggtcctctgcctcttagagttcttccccaatgttccccgagccttgggtgcagggattgtgttgtagatatatcccctgggtcttagcaccccaggatcagttgttctctgcattttaatgggttgtgattttctgcaatggtctgtacgttgcacagaggagctcttgtgagagatagtatatgtacttagaatgactaagtttgcggttatgctgatctggtaacatggtggtcataggtttagagataggttgctttctctgcagttactgattttgtcaagtttctattaaattaaaagtcaagcttacccagttaaagtggttgttaagagtaatgaagaatttcactggctgcattaactcttacaagcctatgcgtgggactgggggcttcagtcaattcctgcctcccttctgtgctctagggagtgccttgatgttaaaatgccgctaacagacagacatcttggcttctgaggtcagtatgcttagttgagcggtgttgtgggaagatgctcacagtgtgaggaaatcccatgagggagatggttcatatttgttgtaatggatgctgttaactgtcaacttgtcaggatctggggtcacctgggagatgggcctctatgtatgcccgaggtgtggggttgtcttgcttgccttaattaagtgagaagagtgtcccactgtggtcgacaccattccctaggcaggaatcctgagctgtgtgacatgaagaaagccacccgagtccatactggctttcatctctctgcttcttggccacagatgccatttgccagccctctcaagctcctgttgcggtgacttctcaactatcggccaaagtaaaccctctctcttaagttgctgtggttggggtatttttatcgcagcaaaggaaaataaactaagatccttggtgttctggaactcaagagaagccagccctaagcttgtctttatgctctgcagccactgtttgctgtttttggtgttagtaattaaagttccactcatattttgatttacagaatttatcacaaatctccaagtgtgtctccatcctggatctccgaatgtcacagccgtacctcctgggtcgtggcccacttagatatggattcaaggacaccttgtaggattctgtttgtcagtcacggatatctctaccaggctttgcttttccttttccaagctgcacaagtttgagccatcccaagagaaagctgggaaggcagcttgcagccattcggggcagtcagtcctagctttgttcccaaaccagttgccaacaggaagcacaaccactgttaaagttcaagtgccttcctatgcctcctctgagatgtgtgtatatgtgcgcacacacacacacatacacacacacacacacacacacacacacacacacacacacacacacgtgtgtacacttgtgcacagccagaggctgacagagtatcttaggcaatccttctcctgattttatgacacagggtctctcactgaatctggagctcaccaataggccagagagcagnnnnnnnnnnnnnnnnnnnnnnnnnnnnntttccctaacttcccagttctgggattaggggtgcacaagtggtcttgctgggctttgtcatgtgtgttctcatgctggcatggcaagcacctaacttactcgacaccttcccagccccctcttttgatttctgatcataatgctgatgtttgctcatctaatgccttcaaagccacagccccttcctcaggaccactgacatgctcccacactgccttttccggagggtggaaaaaggccagtagatgaccggttatcaggaataaagggtctgctggggtcctgataagaaggactccagtgtctgtcagggtagaaatgagcagctacctcctgtctgggactgcgctccccttgagagaggctgtgagagccctgtatggaaccctctcagtgatatctcactccagtgttgttttgaaagtgcttaattcagcagtcattgtcacaccaccattacaaagctctttatgataagctattatcaaggcctcttctcctgagtggaggataatcacaggagacaagaaaaaaaaaaaaaaaaaaaccggggaatagctgatgtgttggccactttgggggccatgttaccatgacagctgtggagaatgtcaccctggcttttctacagctgcagaagggggaccctgatcagacccctaggcccaggctgtaccttatctcctgctcagctgtgtagtgaaagctgaggcccctgtggtcctagtggaatctggagagagaaaggcaaaggcaggggtgccccattcttaggggaagaaagagagtgatggtaccttgggaagggcaccccaggccatgagaaggacaaataaaggtgtcatggcaaacaaaagggaaactactctgtacgaaaggctgagttccgatttttcctcaggagcccccttctcaggagagccaggtccagtcctcaatcacgctgcctcttctccagagagggaccaaacgctcctgaaaaggccatttatccagtgtttatggaagggttttgaactctgttcagggttctgagaccaactacgattttaaaaatgaacctggggtgaccaaagcgattgtgtcctggaaccctcaatacataattctcactcagccatcaaatccagtgcgtcacagatttttccatgtcgagacctccctgaagtcttactccacttctccctgtcctcactcacacctcacaaaaagccctgtgtctggctggccaggttgtggggaggcacacaggacagactgtggtctgctcggggacattgacctcctcgtgttgaaaaggacagaaagattctcagacgtaaggttttactagcatcagttgcttaattctcccttacagccagcttatatttttcgaaaacgttgtcagttcgagtggccactttataatgttttaaggatcatacgagatgggtcacagtgatttgctctgcatgtcatgtgttgtactgttgagtcattttctgtcaagcgtgctgttctcatgtgtgagcccagggatgtcagaccttgtctgcagtcatgtctttctttcattcttccccctccttttatccttcccccatccctctccctcttcctcatgcccctcctcctcctcctcttcctcccttgtcctcattcttcttagatagggtctcattggcctggagctcaccaaattccaggctggcctaccaacaagccccagggacccacccatctccacaccctcttgctgagattgcaagcaccacatctggctcttttcttgtgggtttggggtgacttgaactcaggacctcatacgtacaggttagagactttactgactgtcactccagccttcttgttgggagttcttacggctttggctttaatttttagagtgtgtacataaacacaggtactgacctttgttgataaattaattctttatgtatttactgttttggtttgcctttcagaaagtgttgtgtaataactcagagtggcctatttgagtgtatcctcgaggtagtttggttttacccagcattctaatggttccataaacttattaaccatttctcttactccatttgttatgacgattcagacagactcagaacagataaaacttcgtaatgagcttctatgttccctcacccatctttggtgattatcaacttacactttctctcgtttgttctgtatattctcataattcactatatacccttatagttattttgaagtaaaccccagtcttgatgtcattttatccataaatattttgccatttaagccaaatggtaaagttcaaaacatgatcaaattctaatatcacacataaattaatttcttactaggaaaaaaaatcagtgttcaaatgaacatccataattaatttgtgaatatttcttcacagtttgttaaaaatcaagatctagtcacaattagttaatatgatttttttttttatatttcctttactaaaagatttgccttttacttccagtaaccaagtgttagtcaagctcattttcatgtccatcttaacaggttccagaatcatgcaggtagtttaaaagacctcaccccaacccatgccatactggccaacacagttctggaaacatctaggactggtggttgactattttctagacttctcaaggtgtggccatgtgaatggtgcagacttggttccttggttccatcttgatgcctacagagatatccagacttgccataggtctcttcttcctcagaaatggtcacatacccctgcactctgcaccacctctcctttgcccttgtcaactccttttattttcttgctagttaatgtaaaggatatttgctgcatttaatccagtcttttaatgtgttttataaggagttttcatgtcatttagtcctttatattatatgaaataaaacttcttgatgcttcaaaaatcttttttggatcaactcataatgctcttaactttccagagtcacgattttctataaaggaatataatactttttctttttgtttactacatctttgtaagtaaatgtgtacaatgccaggtggcttttctttctttttgagaaggggacatacttggatatagcttaaagaataaatgactatggctcagttttagacaaaggagtggtgttgggtagcccaggcagatcaggaacaaaaagggcattttcagtcaaaggtccagttgccgtcctgttggtatctatcctagtgttcatccatcacttacttagttgcttcaagattctgttgtctgtatttattccatcttttgaggacatgtgatcatgaaatttctcagcagttcctgaaagtgtgaaccttcatccaaattcccagatctgtgtcatagtgtaaagagacaacatagtgtaaagaatacgctgggatggacgtgggttcccaagagttgccgaaatgccagtctgagagcccagtgacttacggtgatgactcactgcaaatggttttcaaaggaggcttttgaacgcgttggggctcccgagtgctggcatagctcccatgcatcccccaggttttgcagcagatatcttgctttgggagaagaatcaaggaaaattcacagaagccatagggtttagggaggcagggaaagtcaggagttcgaggccagtctcactgcatagtgagctccctgccagcccgtgtttcacgaaaccttgtcatctttacaatctaaatagtaaagatttcccacaactcccctggaagatgtagaaatataaagcctaggctgcaggccaaaactcagaccaaatcttcatgggcaggcaaagagatttctctgctagacctttctgttgacagcttccgctccagcaaaaaaagtttaaaaatgagaagtagagtgggtgacaaggcactgaccaccctcctgtcatgagatgccccttggcagcagttcctgggtgtataattctttgactatatagttttgtgtagagtagcaaagaagccagtattctgagtctgatttatgaaaccaagggttttttgtttgtttgtttgttttgttttgtttttaaagattatagttaaaaccccaagtttgatgcctgcccctggtgctccccatctcttcctgtttggttcagccctgactcctcagcctggtttttagtctttctatttgtcccctgtcacttctggtgtctgctaatgtcttgctcactaattttgcctggaagtactgtgtttttaaacaataattggatctgctctggcctgaaactgttttttcaatcaacatttttttttttttttggagacagggtttctctgtggctttggagctaatcctggaactccctctgtaaaccacaagctggccttgaactcacagagatccgcctgcctctgcctcccaagtgctgggattaaaggcgtgcaacaccaaagcctggctcaatcaacattttttcaccatttataaatgttcacctcaataaaattattgtaggatagagtgatgagaaacacacagagcacactgtggtttcaaagagtggcatctcctgggcatttggtaataaattgacctacagcagaaacagaacgaagcagagaaagaagttttctatcagccaggtatttgctaactgttcatgccagcattaccagagagctgcctgacaagtggccctcgaaggagtaggccaggccaccacatgaatggattcatttacccacttggtggtatttatcagctgccttgtgtgctgggtgttacgttaagccttctctatatgcctctgcgttaactccttcagcagtataggaatcagacatcgctgaggtcctagacattctgtaactgacagatccagtgctaagtttccatcttaagccttgtggcccatcttaatgtaaaactgtgtggactgttgacttcattttctgttcctttggtccatgcctgtcatatatgcagctgtgagggttgggaaaatgtgcagtgggtctgtgttgatgaagaaagggaactagaaagactcacataagaagcaactgctaattcactggtgtgtacatgtgcgcgtgcatgcgtgtgtatgcacacacgtgtatatgcatgtgtgctcttgaatgtgcatgtgcaaactttcatgttggaattgttgacaatttccaattcttttgttgttgttgttgttgttatttttttttgggggggttctctgtgtagctttggagcctatcctggtaccagctctggagaccaggctggcctcgaattcacagagatctgcctgcctctgcctcctgagtgctgggattaaaggggtgtgccaccaacgcccttgttgttacattttaattttaatttttaatttaaattagaaacaagattgttttacgtgtcaatccccaatccctctccctccccttctcccctgccccccagtaacaccctacctttctaataccagttctgctccccagggagagtgacaccttccatgggggggtcagtcttcagagtctatcatatcctttgggatagggcctaggccctccctggtgtgtctaggctgaggcagtatccctcaaggtgaaatgggatcccaaagtccattcctatgctagggtaagtactgatctactgcaagaggccccatagatttccgaggcctcctcactgacacccacattcatggggtctggatcaattccatgctggtttcccagtgatcagtccgggggccaagagctccctcttgttcaggtcagctatttgtggatttcaccagcgtggtctggacctctttgctcatcactcctccttctctgcaaccggattccagttcagttcagtgtttagctgtgggtgtctgcttctacttccatcagctgctggatgaaggctctaggatggtatatgttagtcatcaatctcattagcaacctagatgcccctcaactgaagaatgaatatagaaaatgtagtacatttacacaatggagtactactcagcagaaaaaaacaatggaatattgaaattcgcaggcaaatggatagaactagaagaaaccattctgagtgaggtaacccagtcacaaaaagacaaacatggtatgtactcactcatatatggattttagacatagagcaaaggattacccacctataatccacaccaccagagaagctaggcatgtacctgcagacagttgtggttccttgggctgcttggtggaccatctaagcaacagtggagcggctaccttaaatgccctcccctgacaatttccaattcttgttttacaggtaaaacaattactattactatcactttgccctgctagggaagaacgttgagggttgtctgtagctcccagccaccgctgtgttacagcacccttacttatttgtgctgaaggacccctctctattcacggccacctaggcaggagtttgggtttcgactcctcactgtggggtctgcaagcctccacgagtccctggtacatggcaagagtacaatgaaaatttgctaaaagaacagatgagattacgtctaagatatgacagggctttcatttacatatattattcattttcagctaagatttcagcgtaagttactggcaaagattgagctcatgtgacacgggaaataaaataatacctgctgctgttccaggcatattacttaaaagtctttgaaatgatttctaaattagtcagtattactctctccactgagtactagataagtgagccttcctggctgagtcaaagccggagtgcttcacccatgactcagccattcaggggaggagcaggagctggcaggcttcactgatctctgccacttgctgccaggattcctccagggagacactgtgccctataacagtgaggagacaggcaatgtgctctgacaagcatgctgttaactctgtgacattatgttctgcgacattgatcatcaggcccttcttaataagttttccattccttgtctataaaacaaaactagtaacagggacttcctgggacacttgcgaatgtgaaatagaagccaggtgtggtacacatttgtaaactcacggtttaagaagcagagtcaggagggtcaggagtttaaggtcatgttcagctgcagagtgtctacagcatttgtatccaacagtctcagttgtgaggctgcctaagttgacagtacacttcacagactttaaacttgatctctgacagccgcaataactatggcgttagtaatcactagctaatgatataccagcaatcaatggtgtcctctggctgtgtggacggattatcccagctactttctttacatttctattagtcatcagattaactattacagtgaagtgttattgcttcttttttgcagatgtcagaacagagaatccgttaaagccaggcatggcggtgcatgcctgcaaccccagtacccaggagggttcagggctagttccagctgcacagtgtcttcctagccagcctggatttcatgagattctgtcataaaacccaggggtcagagggagagagacttacgtcttagatacttcacaagtaaaaaaatggaattaaaattcaagctctaaaacccacagtttcctgccacacagctctaatcacatgtacagtttcatacttgattttcaacttaaccaagcaattagttttcgattgttaaaggaactgtgacttagtgttttgtgtttttgactgctatgtgagtgtgatataattgggaaggacacatttcagtgtcttattattttgcttttgcctaaatctttaatgaaaagtgataacatggtaacaaatagggagggtgttgttcacaattccattgctcttaaattctatttgttcaacccccaaagttttatagcaaagggagatagagctctttcaatggctataaccttatgaaatggataaaggaactggtcacaattggaaggaagcccagtattggctgctcatttcacagggaaatgtgactcatccctttgttcagcgttcccatgttgtatgtacaacctacctattgcccatgtagcagatatgcagaccagcaaatcaactgtggttctagtacagtgcttatattcaaataattctattttgttgtctaatggtcttggcataccagagtattgatgctgagagctttattagggtgcatcgttataagtgttgcattttgtaattagcctgatgccatgcttcgttatgtatattatgatacatttgccatagatagacagacagacagatagatagaacctgttgtctcaagcatctgatggggtccttagaatacgtttctcatagataaaggtggactagagtgtgtagtggggtttctcctttctcctgtgcccctctgaactgagtcttggtgcatattgcagggattctaagcagttagtaaagcttaattttccaaacttagagtaaagcaacctcatcgggtgagcaggtgctcccatcacagcggaggccgaagatgtggtggcctggagtgtaggaggaagtctggccgtcttgctcagcatcctcacctcagcactttgaaatctgccatggccgaatttactccatggaaatgacagcatgtggcaaacagctctgaccattgttgaagtttaccgtcacacccctgaagaggtggtccagtttggaaaagaccattttgcttcggtttgctgtgggtgacacccattcagtatatgggtatgtcatgtgacacacgatgaatgtggaggcctcgagccctgagtgaggtcgtgtttaagtagcaatgacgacagagaggtattgtccccgattttaagacttcttacttcatgaagcactaacttgtctcatggcaccaacacttttattgtgtatacattatgaatatgaaaaatccatcttgcaatgatcgtacacctaaccttttacactttgaggtcttggaggaataggggaagcaatgcgtgtggagcattctgctgctatggaatattactttatgtaacgctgcgctgcatttgcttaatgctgtatttgtttaatgacgtaaagatgtgttgctttgcctgcctaaaacacctgattggtctactaaaaagctaaatggccaatagctgggcagagtgggtggggctggcaggcagagagaataagtaggaggagaaatctagactggccaggggcaaaggagaaaaggaggtagatgtgaggggccagccagccagccagacacagaataggacacacacaatgaaagaaaggtaaaatgtcctgaggcaaaatgtagataaagagaaacaggttaatttaagttataagagtcagtgggacaagcatagtgggacaagcgtaagataaggctgagcattcataactaataagtctccgtgtcgtaatttgggggatggtggtccaagaaaggctgcgacattcttcacagggctgaacacagtgtaatgcatacttttttcactgttcataagaaataactctatgtagtgccctgccattttgataaactccacacaggtgctcaggggacgtgttcacacctaggcctgcatttcccggggtgtggctccaggaccagcagcagcagtattggaatttgttaaggatacagatcccggggctcaaccctagacctgttgaatccaaagttatgaggatgggatgaaccaggctcttcaggtgattctgagccagacttcttggccttgtccaacaagaaagcagcaatgagaatagaatcaaaaaagtccctcagccatgcttacatatccctgcagttctgaaatctttgatccaataagcacccgttaatggctcttttgttgtttcttattatttattttcctggcacattaatgtgttaacagctctcttgagtaagacaacaccacaccgagactacaatacatttaccatttgttgaaaatgactccaaatagtttactcaacttacataatgcaggtgacatctatagagattcccttcagaaaaatccagtgagatgcagtcgctctgctttcatgagtggtccattgactctgtgaccatgcacagagtctgggttcttattgttgcaatatttattgaacgaaggcacttcgcatccaatacttaaagaaataaagtcacgttcatgtttacaagtgaccaacggggctgagaagggaagagaaagcatgaaagttatttggcaggagaagtttgtgtcccccagtaaccctgctagcaactctgtcaacaatgctgaaagaagaaaaccaatagattggaggtggtgaggatgtcacgaagccagaatataaatgtgcatgagagaggtaaatgacaataactctcatctttgcagcacgctctgggtggcaccttcttgccgtgacaaagtgacaaaacgatgcatacacgcacctctctgccttgcttctgcttcccactcctgattatttaacggatgcatctacagtccgttaggtcaaataagcaaagccactctgcggcaagacctccgtctggaaacagactcaacattcagagaacattccagccctgcttagctctcaggctcacaagaggcagactttcccctatacatacaaaactctccttctatagattgtggggtttacaagcaaagagcttgcagaagcttatgtctaaaaataggttaaaatgatttttgtaatttgctccttcccattcaaaaaaaaatacttcaaggttttcttatcatcacagttatccacctgtggtggaccgacctccccaagccttcagtgaccctgggcctgttgcttcttggcactgatgttcagagtccttgggctttgtgccgtgaggcgctacctggcccactcaggccctgtgtgtgtgctccaatgagtaacttcttaaaagccccacacaaatgcccactttatgttcttgggcctcctctcactgtaaaacgggaacgctagccccgattccaaggaaacctgtgttagcacaccctccccttccttgcctagaaaccagagcaccctgtcttctgggcatgcccacttcctgccatcttaggaagtaggcccttcagtctggcatgacaactctagtttctttcccaatggccataaagccttcatcttgaagtattcaataaatgtttttttccagaacatccttgtacacaccaccaataaaaagaaaacaaactgttgttagttcctgcaaagctgtgggtaaggagtctccacctcagctgacacaggctaacttattgacatatgttgagctagctcaaactccgtaacaacatggcccaatgtaccaaagttaaggtgcttcctgtccaaagtgggtaacttggacattttctattttcacacggctcgctggttgggcctgtatttcctgttattttaactgcttcatataggtacaggacaaacatacactcacccacctccctcccaggagcttcttaagcctgtagcttacatggcgttcacacctccatcacattgccacttccctctgtcaggccgggccagcctctgagtgagactgtgatttttgtctctctgttcccagagccatagaacagtgtgcagactgtgtgagccatgaagtttggtgggtggacatggggtggactgttggatgtggctgggcgttgctatgctgtgcattgtcttgctgaggtcaggcctagtgaaggtgacacaagctgctaatgaaagggggctttttgttgtggagagactgtgtttgtctttaaggtgctggccggtcactctgtcttgatcattagaatgtacgtgtctcacgaggacgagggagaacttggcaattgtggtgttagcccggcagcctccagggaccaagacaattatgtgggagaaatcttggtccttctgtcagaaggagaaagcccaggaacgtgcttcaggatgtgacaggagtgagtttagaacattctatctggcttgctgctgccgaaaaccaaaaccaaggtcttttttgttcctttgcttcagttctgtagatcctgtgtgaggacaggaagtgaacccctgcagccttgtcaaactggtgccccattggaacgtttaaaaacgtacttaaagacatgaagatagcagtgggggttgttggaaggagaaagggagtctttggagggggagagggcagtgagggcagtggataggtgtgattaagatgtagcgttcgtaagaaaatgtcatgatgacatctgttgtctgttattaatacatgcagatgaaataatttttaaaagtgctttcagaaaggacttgctccgtgacttagaaacgtgagctgctcccctgcccacccggcacctttcggtcctgggctgcataaccaccacctgaatcttgctttgtcttccatccacatctctggagaccagcacgctcatgattccagtgatgtgcctcttagaaatgtcacctggagcttacagtggtcctcctgcttcagcctccagggcactgaggtgacaggcatggggccaccacgctcagtttcctaacgagtgatcttgttcagattgctgcagtagcatcttaggatccttaccacgtcaccaaacatctctgcccattttcctgaagtgtgtctgaagccgtgtcacactcctgctggagagccaagccacctcctcgtcacccctttgttctctgtggtcacccagccttttctaagctatgttttgttacagttctgctgtgggtctgcccactctgctagcctgcattgtcccattgctggcctgtggcccctgtatccgctttcagccaggctgcctgctgcgtgccccaggcctgcagggtggtcccctagcttcccctccatctccccagcacccactttatagggttctgtgatgatcacaagaagaaggacatagaaagccctcagatgagctccagatcgctgctagtggctgtcaatatgataaggcctttcaagcccacattttaagcagagccgtctatattttccttttagatttaagttccttaaccttttataattattctgccttagagtagtgtgtgagtttattttggactctactggacatcgctaatcaaatagattaagttttatttatcattgtagcatgctctgaactgtctattatagtacccggaacacagaggaacttagtcaatactagtcaatatttactgaattgaaataacgcctttgctgttttcaaaccatgtgccactgggtgggatagatggttccatgattaaaagtgcagactgcttatgaagaggacctcccagttctcagcacagtgccagctccaagagatccgacaccctccggcctcagaggacactgcgttcgtgtacacatacacacccgtggacacacaaacatactcaattacaaatagtaaaaacatgtctttaaaattgtgtgtcacgagttgagaaaaacctgtatcacataaatagaatgaacggaagagcttggcgacgtagatgacaccgtggaagggcagggagcttcctgtggtgggaatcctgacgcgcataccccagtaatgttcctcctgctgtgtttcctgtggcaggtctgcgtggtggcctaccttggactgttcatgctttgtgtctcctaccaggttgatgagaggacgtgcgtccagttttctatgaaggtgagttgtaatgctagtctttttagttaatttccacgagttaggctgttcctagagcacatgaagctggacttttaatgtccccaaaggagtattgagcagccaccagttcaaggaaacacttggccagggaaaggtatctttctgggtgcccacttccatatctcgtgatcatttggaatatttcaacaataaaacaatccgagtgtatttccccttgtaggtgggagcaccgagacagaaagggaacattgggtgaatccagtgggccctgccaatagtccgtgggaaatggctaggccgtgcggtggcttggaagttgtatgtctttctttaccgtgaactttttgtctgttgtggacggtgcatttggtggctgtctgtctaagtgcacagcacttcactgcacaaatataacctccagattacacttaacacttaaacagagacagaaacacatccctcagaggtgaggaggagataaaacaagtgagcagtctggctgttggttttcactcagtgccatagccaaggatggagagtattctctatgtttctcttatccatttgtagttggcttttcttccaggcatgttctttgctacaatcaggaaacatgaagcccaagattaagtcaacagcattatttaaaaaccacaaagattaaaaaaaaaaaaaaggatgtgtttaaaatgtggagaattagctcagtgggtacagtgtttgcctagtgtggacaaagccctagatttcactcccagcacctaacaaatggagcacagtgttgcctgactgtaatctcccctctcatggagtagaaacagggatcagaagttcaaaagttcaaggccagcctcagccatatattcagttggagacaagctaagccacatggaatcctgtgtcaagaacaaggaaaaggaggagaggaacaatgtcatattcaaaatggtggttaagaaaacaatgtgcatacaatttgaaggacagttgggagccactatgtggctgctgggaaccgaacctggtcctctgcgagaacagcaagtgttcttcaccctgggccatctctccagccctgaaattgttttgatatgaccggtttttgtttgtttgttttttagaagaagactagagaatagacacagttcagggtgagattgacccaaataacaaggtatggtagtgagaagagggaaagaaaacaaaagaagaaaagaaaaaaaacctagtaagaaatcgcttgctaagtttcaggaaattcatccagcaggtagaagcattctaacgtggattttatccagtcaaggaaagcacacaacttccccactccttttgggatccctgaagaaagcaggggtgaagcctccctttcagcaagtccccccaccaggcatctgtacctcaaaaaaagggggaatggggaaaaagaagaaagaagaaaagtggctgccagtgtcaggtagactgcagactccccactgggaagaccttattagctctttcctttcttcaccatgacagacacacagacaggaggcccttccttcagccagactgctgccagaagcagtctgatgtaggtggaggattttgtcctacctggtcccacagccgcaaataagcacacaaagatttacattaatttatatactgtttactgactacttctgtcttaattattaacccataactattaatctatgtgttttcacatggtcttggctttttggagaatgcctggacctgttactcctttggcggctacatggcgtttcttcacggcctctctacctctctccccagcattctccttgcctcctaggcccgcccatcttcctgcctctactggccaaacagtgttttattcatcagccaaataagagaaacatatatacagaaggacatcccttatcaatctgagaagccctctgtgtcatcttcagtcctcagcagccccatccaggcccaacaggacacagctggtgtcccctgtgtgtcccaaagccttttgtggggaatgaactgaacctttaggaggggcttgtcactgccctttagccctctagccctggacaaagctttttggtttattttcttcttgtacaaacacacacacacacacacacacacacacacacacacacacacacacacaaactcacacacacaaacatatacacttatactctcacacactcatacacacaaatacacacacactcacacacaaaacacactcaataaatctctctctctctctctctctctctctctctctctcccctctcgattcccccctctctctccctcttagacctggaagccaccagcacttccctgcttttccccaggcctctgcctctgaacctggcaggtcaccaagtgtggaccctcctacccgccctctgggtgccccttttcctcagtgctctcctgcatttgcccaactggaaggtcatgtacctgcagacagttgtggttccttgggctgcttggtggcagacctgccccagcggcggagaagccttaccattctggccaagggagatcattaaatctaaacagacacctagtctcctcagagccaccagctgggaaaacctcagcgggctccaattacagcagggcaggagcaagcctggggattacataagcacagagccggcctccagggatgttctgcagggacacccacaatggctgctgtcacatcccaaggtcaggccacacacacctgccttcattgatagtttattcctaccatgtgggcaaaaacaggtgcctggttttaaattgtggtttttaaggaagtgcattgcaggtgtcaccagcaggcccgagtgtgacctaagagaccagaagctttcctgactctgatgtgtgcccgtggcactttgcttctcttcccctgtccttgagcgtctggactctgcatatttaagaagttagatgacaatgaagcaacctctgcatttgtgtcagtgtttacaaccttctaccagccaagtccgcattgtccctcccacaccacgcaacagaaaacaggacggatagcagggctggtcctgggagattccaggaaatgatagcatcccttctctgctgctttagctctggtgccctgcagagatgtcagctcttgagcctcgtagtgatgatatgaactcaggttagatagatcattccaaacttgcaggtcaagtgataccagttaataggtccaacagatgagccccaggtagcattgggagtgaagccttaattaggtggcctggcctgctggttcacgtcctttgatgttgtgtccatgttaaaaggtctttggcaagtaaatatttgagataaaacgtatcctttaaaattttttaaaattatattttatttattctctctctctctcgctcgctcgctcgctctctctctctctcgcactctctctctctctctctctctctctctctctctctgtgtgtgtgtgtgtgtgtgtaggtcagggtgcatcttgcaggactttggctctcccctcccaccatgtgggttccaggtattgaactcaggtcatcagacttggtggtaagggcctttacccactaagccatcttgccagtcctgttttctttaaaacagacaaacttctcattgtcaacagatggactttccccatagtgatgcaaatagctaatgtttaaggacatgcgtaagcatctgagagagattgtgaacgtgtgcacaccggggtgtgtggtagatagaaaagcaaccacaggatctatctgctggtggcccaaaacaaaaatggtgtggcataaattcaatttggggatgttctactaagtggatagctacccagagggaaaagaccattttaactctcgttcctcctcctagcactcacacatggccagcataaactggttctcatgccaagaatttaaattcaatcaccaagtccaaagacttcagaataatccacaatattttcaatattctatgccattagccatacacaataaatccatattttaaagtctaagcactccaagtctacgtaaaaaattacactgaatgttctggggatgggaccaaagccctctttttaatatcacagattaaataaatcctttctaaattttataatgatgccactttgcatttatctgatcctttccctccaaggaacactaaacatgtcaaatacaaattatttctgttatgtttccaagagacaagatgtttcagccaggcatggtgatacctgcctcatatcccagcacttaagaggaggaggcaggaggatgaggagtcacagaccagaactgttcccagtaaggggtagctgtgtggcagcatacaactgttcccagtaaggggtagcttttgtctgtgtggcagtataaatcctgccctataaactctagacaccagtcccaaagtctggtctttatctgggccccgcccaggtggaccactaagagagttgggtccagtgtgtgaaaccagtcacaagagcatctcttgtactgtgcagtgaattttactgtggccgtgtgggtgagaacccacgacttttggtcacagtgttccaggatgtaaacaaactaaatcagagatcttttggagagtccacagttccttcccagcagtcagaacttaaccagcactcccaatcccagagccaacagtaggccaagtcacctgccttctgtagccatcatccacttttccacccagaggtcccctcctgcaaaggggtcttgaccatcatggctgtcctgtgatagctcccacatcaagtgcagtctgttttccatgaacttttattgatagttaatcagtttgtaataattttgaccaactctgtgttcatgttcatagaagcctgtctgtcctttcctttcaaatctcgtttctatcccatgaccatggcatttctcaatttaaaaaataaatgctgtgtatcatctgggagagagggcttgtttgggattcatttacattacctgctaaatctagacataaacattccagtcaggctaacaacaggtcattgcaggtcatgggaagagccaacggctgcatggcaaatggcttaagggtggtttcccagtaaataactctagagctggcgctcgggcactcacacttgagcactggaggcaggagggttgggaaagcaaggccgtcttcagcagctatggagcaagttcggggtcagcctggagcaggtgagaccctgttgcaaaaatcagccagtcatctaactaatgaacatgtatatacccatgtcttggcattgtgttttgagaagagagtggcccttgcctcagagagccagtgaagcagtgttggagagtctgctgctctctctaacagaaagcttttcttctctcttgcaggtgctctacttcctcctgagtgccctgggcctgacggtctgcatgctggcggtggcatttgctgcacaccactattccctgctcgagcagtttacctgtgagacctccctggatgcttgcctgtgcaaactgccctcctcagagcccctcagcaggacctttgtctacagggatgtggccgactgtaccagcgtcaccgacactttcaaattgttcctaatcgtgcagatggttctgaacccggtctgtggtcttgtgtgcttgctggcttgctttgtgatgtggaaacacaggtaccaggtcttttatgtgggtgtcgggctacgctccctgatggcttctgatgcccaacaacaaaaggcctaacagcttggcttgggggtagaggcagaaacagaacccccaggagccaaggtggaaaccacaattttttaaaggcaaacttttgataacaaatgcttattcattctctgagtatttttagatttttttcagaaaacaaaataacttttttttagatctcttattgtacattaaaaaaaaaaaattcttgtgaggatggggtggagagatggcacacaagttctcttgcagaggaacctcgttcaagttatttcagaacccaagttgggtacatcatagctacctgtatttccagttccaggggcattgggtgtcccacacatacacacacatacataatttttttaaaaaattaagacttattttttaagtttttttttaaatgagaaacaagattcaaattggtttgataaacactaaaaggaaaaggaataacgaacaaggaatgaatgacctcagtctcttgctacatgccggtgcttcctgctaacacccttttatccatgacttacctcctttcctgtcgctccagtgtgatggtgtggactggtatctaaggctgcgtcctagacgctagacccttctagttccttctaccaactgtcattatctacgtgatgtctcaaagaagggtggaggtctggggaaagatgaatctctgtactgaatgcttttatttttcacagtagagatgtctttaaggaatgaaatagctttttttccttttttctgtttttttaaaaacgcctagtagaacaggaaggctgagaaattaattataaacacctgggctggggtgcagccttctagctgccttaactctgctcctgagtgggctgcaacctccctccgtgactgtccacttcccataattgaaaggtggtgccattgcattcttagcgatgtagaaagcttgaaaataattatattatgcttctagtccagcatctaaaacaaatcattaagactaatttccagctaattgttcattacaattatgctcagaagtctgtttaatgagctctggctgtacttaggcagcactgttggtgttaagaaaaattatagccaccagggaagatgtctgaagatccactttcctggaagccaaccactgcaaaaaagaacttgtagaacactaatactcaggtttaaaactctcttggaggaaaaaacaaacaaacaaacacaagaaacaagagcttccatcagaggaacacctgcactatgaacacactagtgtgatatgttgaaaagcatctcccttgacaaccaagaacctttggtggtgacttggtaccctggtgagttctgtcatgaacttggactttctataaatcccattaatgatgacttttatggcctacctagagacaaatatctcaatgtcattatttgggggatatgtctacggttagagggctgatttagttttgttattggtttagacttaagacaggtacctctttaggatggcctctgctgtgttactgttattagcgaactcagaagaacatttgggcatcaaacaaagtgttcacctgagaaatccacaccatgaaaacactactacaaatgtctctcttaatttgtgtttttaaaagcagaagttccaggtcacagttgagccaagtttgctctccaccctgcctgtccagttactctcctggtcacaacatttgccttaaggggacatgtattctcctttgcctttgagagtcagtggagagttccatgatggggacaatggagtcagttctgtgtgacacacacatcccaattgcaggaatgtgttaggctagccacctggaagactgccattgtggtttcctccaggcaaaactccttatgttctgactttaagcctgcctctcttgcctgctatctcaggtcaggaatgctcctcagagagaatagtgggtaaaattccaccagaggtctgatctcaacttttcgtgagcacagcaataggcctctagatactgacctgaaaaaccttccatacttgttaagaataatcacctctaggctggggagatagctcagtgagcaaagtgagccccagtaagaacttgattcttagaacccagaaaaaaaggcaaggcatggtgacatgtgcttacaatcctggcactaaggaagcagagacaggcaggtgcctgggactcctggatcagacagctttaatttaatgatcaaattctgggtccctggtaagagagtttgtctcaagaaatggaaacaaaatataaaccaaagtgggcagctgacctctggcctacacacacacacacacacacacacacagttgcacctgcacacatataaagaataaccaaattcacatcgacttgtggtagttttctatagaaatagtaaaatggttgggaatctgtgatgtaacaagctgtcctttcaaagtgaggctgctttcatgcctgttgctgtgcattgcgtaccgttagagacacacagaacactttcgcagctttgaccagcaaagtcaacaggttttttttttttcctttttatgagaaaattaatatccctacacatttaggttgctctatgctttacaaacgactcacagagtattttaaagggtaaaataattttagcctgcaggtttcttgttttctaacacaatcaagagtaggtactgtttaagcttataatattttgtctgcatagaatgggaattttactattatatgatcgaattcttcttaactccccaaaagaagggggaaggttgtaagttcatagaaggagcaaagccaaatgtaaggatccctttgctaaaactctctgtatagtggcgtgtgtaagaattgtattgcatgaataacaaatggctttgggttggatttgaagtattttgacattatgttttgcaaatattgaagctgcagtaaggcaacagagaaggagccggcacacagcttctcacttagcaaaatgttacacttccaatctgtcgaggagccagggtggtgactgtgccttccaaaccctaaaacagcaaggtttgcacagctcccctccccaaagcctacttcaggagaattaaatgaatcaagattttgcaaagatgagaaatggccaggacttggcagtacttggaataggaatacaacagcccgaatgtacagactgtaactgagcccactcaacgggtctgtgccttcgcgtgatcatcatctgtggctcccaagctctgtccaaagtggtgtaggcagcaccttggagccatgcctaaaccatagctactcccaagccctagaaactgtagtcaagtagcaggcctcgtgtgtctccttccttagattgagggcttaaatgttcccttctgagcgccttgcagtgtgttcccacagtgaaggtccagcccgtgtgtgctttctctccacgttcaacacgatctcctgatgctcttttgcttacttctatgtgcagtatgtgatacgcttgtgagactctagtagagactggataaaatctgtctggggtgttagggggcaactgtgaaacagttactaaacggccatcagaaatgaacgtgaaagctgtctgtcacttacaaacatgaactgtgtcctatttcctggcgaccatctctgaattcttgctgcctggtcacatttgtataaatatgccactagatttttctctagtttaaaagcccacaatgtgctttagcagagcagtgtaagttctgtctgtctggtggccaaatccttagtggtcaaaccactgaaatgagttcacgtcttttattttcttatcttgaaggagcactgtcccttcagagctgcgggtctgggtcttggtgctgccggtttccttgcctggccttgatcaaatcaaaagatgaagcgtttctatacatttgaggtggttgtttttaaaggggggggttcgtgtgtttcctttattaataaactttgcataatccacaaggcatggtgttgagtatgttttaaagtgaccgtgcggtttgtgtgaattggtatatgtaaaactgcagagcattgtgttaggtgaaatgagccaggttcagaaagactagtactgcctgtttgctcgtgtgtgtgtgtgtgtgtgtgtgtgtgtgtgtgtgtgtgtgtgtgtgtgtgtgtgggagatccatgtgtgtgtgtgtgtgtgtgtgtgtgtgattaaacttcaaaggataccataatggagaaagaagagatcttaatgctgtgggggaagggagggcgttggcatgcagtgacttgaaagggaagagaggctatgggtaaggacagaggaccaggaaattgaaggcagggacaggggagtgacagtggtgggattggtatgaataagaacaaaatgagtatttttaaaaggtcataatgaaacataatactttctatgctacctttaaaaacataatttagaaaagaattaaaagaataaaacaaaacaaaacaaaaaccctgtgttgggaatagacaagaaccagcttgacagggatgctggtttagtcccaggcaatctgcattttacactttgcatgaggctagaggtcaaggctgtaattggtccccagggagaatacaggctggagggaatctttccagaggtgcctggaatgcagattcctaaggtctgtcaatcaatgtcaaataaagctgactgggcctaaaaacaggatacttgctcctcatattccagttataaatatgtgcacatatggtggccttctccactcagatctggatcaaggacatcctcttaccaactctgaggcagtggacatactgtgtctgtcattctgtgagtgctgtctctttctgtttactgagggaagcttctacaatgcgaagagcaagagtggtcagtacctgtgcaccccttgagccaaatttcattcctcagtgtcaaggccccagggtcagaagtctgaccccctagacaggccatttggttttagtttctgcatatgtaatacagaaaaatggaactgcctccctcacagcctcctgggggaagcaaaatgaagccgcacttacccaggaaaacttcagaacatgtgagtattttcatggacgcaggcctgtttcccacatctagctaaaggagtaacttggatgtaagccagtcattgtgaaatataacatatattaccctgcatttttaaaaattcaaagtgtaagcgaaagtcagactgttctgagacaacaaaatgctcattctgtctttgcagcaaatatttatacttgtgtagtggtcccctgagaagcctgggaatttaaaggcagttgtttctgttggggtggagcagtagaataattcttagcccaagggactgtgacatacaatcacagaactgttggggaaagcagaggtttttatcagcattcctaatgctaagattatggggatcccaagttttggtgggaccatcctctgtgactgcagcgggagagcaagcctggtgccttgtctgtgccatgccgcttggttctcagtacccaagtaggggactgaagagtaaggggtgagagacccagtgtagccctggccctgaaacatggagctgctgccctccaggtgagatgcttcatttactctgttgaagttccttccaggccttttgttgtctctgccagatcatgtgtggttccagatgagagctgactcaaggactgagtacgtgaccagagatgactgtaatcttgtgagatccagcaaggtgtttcctccatcttcctatatacgagtctattagaccactggtagcccaggtgggccctgaggttagtgaggcatgtggggtgaacagtcaaactgattggaaagtgtgtgacggagttattttaggttcttccattcagggcagagtccatgcactctcactaaagagggccacgtcttctgagacagcttcccctctggtagctttcatctttcagtaatgtttggttttgattgtagcaaaatgacataaagatgttaaaaattctctaaggggagagggcttccttcattttaatacagggaagcttaggatttcaaacactgagtttgaccagagcgggaagagagtgatgttgagcatatttggatgaggaaactgtattggaacctgggctctgtttggcgtggcttgggttagagaagagcaatgacccagaacaaaccttccacctaccacgcagtttcgaagttgctccagataaccctggggaaagtggccaaggtggttatctccacttgtgcactttctctgtggactctctgtggtcttccgatgatcacacaaacagcgtacaggcacacacacccatacacacatgcacactccacagcaaaccagcctctccttcctccaagactctggtaaggtattgtgaactcaaatgttggcggctgatatagagatccccataaatgtaagccacccagtattaggttctttctacaggccggcagagttttctgatctagggaaaggaaccaggatgccaagagcagagacctggccagctgcttcaaacacagccgtgtaggtagccacctactctgtctgaccaagattgtgacagggctccagagctggtgggacacggagactatgtcccattagccttggctgtgctgccagcctgcagctaaagtagctgctggtcataactgagtgatactttgctcaaatctattgaaaggagattccagaaagcgaaagggaagggacttttcctcacacaggtccagagggcttttactgtgaagggagaatgaacagaagaggagaattcatgcaggagctcttggcccctggtctggctccctgggcactgcagacagcacaccaaggttgactgactttcctcagaccccgaggcttctcgtcatcttccacagaacaccctcagacactggcctggaaccacgccatcccagaggagggaatactagccaaaaagaaggaaaaactcccaaattgtaacttaacagagtgatctttttttttcccccctttaattcccaaaatgtgttttccccagtccctgagcacagacctgtggttttgtctccctggctttacagcctctgcctggagccaagagacttggctgtgctttcccctgagtcagagtctcggctggtagctgaacccaggaagccctggcccccccatctctccctggaaccaccagcccacaccaccgccgcctcctgtgctcagccctttggctgggtgtcctgcctgttctctgtttggaaagcgccgtcttatgtaactccagaacctactaaatgcttcattgtcttctactcgggggcactcagagcaacctattactgacttatgacttatcatcaagatagaatctcttgccagtgtctcctcagcgccttggaactggcctcacctaccttacggcaatcaacagccaggcttaatgcttgtggtctttggggaattacaggttcagtgcaaggtgcagggaatacaaagtcagggttcatccgtaggtcagggtggctcgttcagttcaggacgcacagcaaagccatttgcaactcaaggctgaggcaggcgtaaacaattctgatctgattattcctttactaatctgattttgataaacagctgatgaaaacgggaggcgtcttggcccttgaaggagagatacccaggcagtataatcagtttctcttatctcaccaggaggggattgatttcaagactcctattaatagcgcaggacggcagggactgtgacctctgccccggatcttcagagccttgagagcaaagtgacagcagcctattgggtaaggtccctttgtccatctttattttctatgaatctctgattagccctgttgggaattctagtaattactgtaagctggcacctccagaagaaaaaaaaaatagacctcttaggattcaattaaaaattaaaaggacctttgtgtgtggttaccaaggagctttcccagaacagatggggtgtggacctgcacaagtcaaacgctgctcataggtgacatttccatgtggttctgctgcctcagcatccctagggagagttgctcatgagtgaaggggtccaggctgttgttctctcctccccacagacctgtgaccttccaaagaacaaatatgcctcagattgccatatttctttactgagcttcaaaactgggacctagggggctggagaggtggctcagcagttaagggcaccggctgctttcccagaggtccctagatgggttagcagacacacctggtatatactcagacagacacaaccctaaataaataaataaataaataaataaataaataaataaataaactttaaaatggggagcaaagagaatcttcccatttggatgataaaacagccattctctcaaggattgttgaagatctcagtctttaggccaaagctactcataatcttacagggaaagattttagcacatccaattagaaacccccactctataaaatactggggaaatctgctgcttcccgtttcttctttcctagtgacaagttgaagttcacttaacaggaggtggttgagttgcttgatttttatctgaatacaacttgcattcccaaatggacaagtcagagctctccagggcttgcggaagtgcccttgagatctgctccccattcactgccacctggccatgagagggcatcagcagacattggtgggaagtccctgaccgaaggggtctaacatgggaaaaaccatcactgggacatggggaatgtctatgtctgaagaagaagaagaagaagaagaagacagtccttcaaagacccctcacatagggggtagctttcataggggcttcattcacacnnnnnnnnnnnnnnnnnnnnnnnnnnnnnnnnnnnnnnnnnnnnnncctgctgaaagtcaagggaattagcagagacttcagatgaccccactatcctttctttttaaatttatttttattgtgtttgtgggtgttttagccacatgtgtgcctgtgtaccatgtaactgtagtgccccaggagtccagaaaagggcattagatcctctgtaactagagttacagacacttgtgggccttcatgtggatgctgggagttgaaccccggtcctctggaacagcagcccatgctctaaatggctgacccctctttccagcccctgtcccttctttttttgtcccacagactcttcttatttcaaaagcactttgacttagggaatattgaagatagggtcaaaaatggtaaatttaagggcctgtagaaagactgtaattataatacccactattgtttcaatgaaataatacaaatttaaagcaacaagtccctcaattatagtacacacacacacacacacacacacacacacacacacacacacacacacaagattagacagggtttccctctgaagccctggctgtcctagaactagctatgcagaccaggttggcctcaaactcaagagatccacctgcctctgcctcccgagtgctgggattaaaggcatgagccaccactgcccatatagtctgcatattttaacacgtgaaaataatatacaaaagcatatttctctttagtcttgggagagcccccatgatatttggaggatcccatctgtgtatatgaacctgagaggccatccctgacagttgagaagtgttccatgataattctggaatcaaagtgtctgtctgcatctgagtttcagagcttagacaggccagccaatttctttgtacctcctctttgggcctcatctgaagggtgataatggatgacttagaatggtacccacagtcagcactgtaagttggtgatggtactgctggtagtggcggtgatgaccagtcaacttgaccacatctaagatcaactaaagcacaggccactgagcactcctgtgaggggttttctggatcagattattggaggtgggagtgcctcccctaagtccagcctgggatttctgaggtgtccagcctcaggggctgagctactgtagggttcttggctgctctagtgtgaggcagccatggctgtgctatctgggccatattatgtaagccaccctaaggaatcaatactgtaggtgaccctgctcggacaccccttgggggagggggtgagatgatgcagcaccaatgactcagacactgggagtcagtgagtagcagagagtgctgcagactcctttattaaggaagttagacctgcctttataccccctccctaggtcccattggctcagttgactgactctgctgcattgtcctttcctcattggtgtctatggtcaggtgtctcttcgtctgtagtctcagggcacaatggtaggcttggctcagggaggacgtgcttgcctggcatgctgaggctcatgcaggctggcctcgcacctgggcagggtgactatggcttgggtaggctggctgcagtttctactacatatctcctgtgtgtgtgtgtgtgtgtgtgtgtgtgtgtgtgtgtgtgtgtgtgtgtgtgtgtgtgtgtcctattcgttctgttcctttagagacccctgactaacaaagtgatggtggtggtggtgatgagaacggtgactatccacgtgttggaatcacagacacagcagaaaaccagagaagtcctcttaggtcctgaagctcctctagcaaagcactcatcagttagtagtttctgtcctctgaaactgataacccaatagcaacccctctctctgccccctgcaaacacagcacgaatactgatgttttcttgtgttctttctcagatgtgatttctaatcagtgggggaagtgaaccggagcttcccaagtcctggcatctggaaagccctgaggcttggtgcccttggagaatgaactccatgccaggcgagcataggctggtaggtgaacgccccagaaggtctttcagggagtgaagcgataactgcttggaaggacagcatgtcacctttgctctggagccctggcaggtataggaagtgtttgcatggatacatacagcctttttcagcagctgggtgctatggtgaaatgtccccccacaggctcgggcatctaaactcttggtccccagctgatgatgctgtttggggaggttgtagaaggattcatagccccgcccacatcctgtccagtctggactccttagtgtgaccagctgcctcatggggcagctgccctgccgtccttccctaacacgatgacgctatccctacctaaaccatgagtcagagtaaacctttccttccatagtcgcttttgtgtcagcaacgggagagtaactaatagacacagtcaccttctgctcttcatcatctctgtccctgagccttgcatagcagttgtgactcagatcccatagtggggcagcactttgtgaaagccctactaaggacctttctgggtaaaccagcatcccccggctttgcagtttctcatctagactgttttcaaacattgcttatcaggccactctgcctgcccaaggccctgagggttggagctgaagtgggcaaaacaggccagccctgtctgtccaaacctaactgtgcagtgttgtacacttataccctgtagatcttgaggacctaagacagatcagctgcagatccacagtgtgcttacaaattagaaacagacagtcatccaggcatgagacgacttttctgtagagctgtggaggaaaggagccattgccttcactggtgtcctgggacctgactggaccatgagaaggcaaagggcacacccatatcatcactaccccaaacctccagccccttccactccaagtgagctcgcttcctttcttttctttaaaatgaaacaaaaagaactagaaacagaggaagatccatggagactgaagtgtgggagccctgagagaccctcacatggagttttatgcttgtttctcccagaacacaacagcagctcctgacagagaaagaagggaaaggtatgtcaggctttttctgtttgtttctttgctcatttctgtgacagcacacctctcatcagcagcttcaaaggcagaaagacctgctttagttcctgatttcagatggccatggccggctctgtcagttctgaacctgggataggcagaacaccgcgatggcgggattgtgcgacagaggctggctgcttcttgatggacgagaatcagggacacagggtagaaaaggccagggcaggctataacccctaagaacgcacccctcaccaccctacttcctcggggaggccccacctccccctttccaaccccttacaataatacaccaaattatgaacccattaaggcatcaatccatcaattaggtcagagaccccaggttccaaccactccccaaaagtccatcagcagctgaacttgaggacatgagtctatggggacacttcatcgtcacactgtaaccggaggtcacatgaaggaacgcgtgtgatacttccacaggacactcaggatttctgaaggggtcacatgctgctttgtaagagctgggctctagaagcattaataaaattactggattttaatatatatatatatatatattggagacaacacttctctttttcacacccaaattcgtactccaggagcgcccctgggaccttgacatgaagcaaaagagaacctttttttttttcaagtttgcatcttgttgctaataatcaaaagttgttttttaatacttatttgacttgagaaaaaaatacaaaagcaaaagaaaatattatcacaatctctttagctgatccctacacattttttcttaactggaggaagattctttctcaaactgatgtctaggctgtaaagcaagaggccccctagcctggcatgctatttgtttcaccagatcaagcagaatagagcagagactgtctgccccgtcatccagatccaccccattacccagtgcagacttgtgccaaaaaccagcatggttttcctctccttttgtggataagagtttgccatgagtctctgaagagactttggatttttaagcagggttgagactattaaagactatgaggacttttgaggttgaactaaaagcatttttcagtatgatatggctacaagtctgtgggggcccaggagtgggatgtggtggtttgagagaaaaagggccctcacagactcacagggagtggcattattgcaggagtgggtgtggcctttttggaggaagtgtgtcacagggggagggctttaaggtttcagaagctcaagccaggcccattgtcactctcttttcctgctgcctgccaattcagaagtagaactctcagctacttctccaacaccatgtctgtctgcatgccccttgcttcctgccatgacgataatggactaaatctctagaacctgtaagccagtcccagtgaaatgttttcctctataggagttgccatggtcatggcctctattcacagcaataaaaaacataactaagatactttatttttatcttaccttgggaatttaaagtgtcttactgtttgtctaagtcctgcaattgtgcaagttctaacctcaggaagctcaaaatccctattcatgttctctgggacacaggctcagccacctactttccaaggaccctgcctgtggttcttctacatcccaattatttagttatttatccacagacatttctcctaatatgttttcttttttaacatataagaaagctaaatagaagttacctgtcttgtcccagcctcagtgatttagagtggaagtcagagagggagacaaggggccacaacacccatcaggagaggctaagcatgactggggatttctaggaggcagccaggcagctctgtggttccgaggttgaaaacacagactctccatcagtccatctgcacaggtcctcatccaggctgagctgccatttgttagctatttgtactccaagtcctcaactacccttccctaagtcccctcactcatcaaaggagggggtttgtgagtgctttgttaagtgccttgtgagtcttacatgggctactgtctgtcacctgcagggcagagtatctggaacattccaagggtgtaacccaggtttgttatcaggaccatcttgcttcctggcccatctttgaatttgaagatttggtatagagatgcaagaaggagggattctgttgtggtatatggtggggactgaggataataaggcagctctgagttgatatgatagcaaagtcttttttcttctgtctacaccctatgtacacaacttccatttaatatagggagcaatttcagaggacagagagatgacacagtaattaaagttgtggccttgtaagcatgaggactttagcttgatatactggaattcatggcttaaacaagcaaaccaggcgtgtgtgctcataatgccagtgctgggaggagactgaggcaggcagaccccagggttcactcacggcttgggctaatcaatcggcaagcctcagactagggagagatactgtcttaaaaaacaaggtaggcagcatgcacccaaggagcgacgcctatcctctggcctcttcaagctcctgtgtgaactgaaggcgaagggtgcaatgatatcactagacccaagataaatgggtgtttattggggaagaaccacaggagcgtttctctgcccttccaagtggatccgctcacccaagaggaagaccccacaagagagagaccacacctcacgctttactctttcgggcttctgtctgtctgaagccatgcccaaagggatgtggccaccgttacaggctcacaggcaagacgccactacggtctgacatggttacattcagaaggccatttaatgccagcaaggaaaaggaactggcatcgaggccccacggttcacactgcagagtaccatcctctgggtctgactttattgtctgtctgctttataaccacaaatgcagcataatgaacacacacacaccggcttgagaatggagggctgtgctcattgcacaaatagatcagatcctccctccccactattccagagaggggccaaacaagtgacttaaagctgaaacaccaggccttggaggcagaagagaaacaaatgctgaccatggccatcattgcctgtgcctctgaacagctagaagcatccttcacctgctcaacttaaaaataaattaattttttaaaaaaggacttggctccagcttatcttagcaagtgactcatgtgggctcagctgggcggctggctgtggcctgagagtatctcttccactccacactgggtccttggcaacgggacaggaggccacaggagctgggtgaggctggacccagggagggggaaagaatggcgtgaaatctaatgcagctgttgagatttcctttcattaacttaaattatatcaatttctagacttcagatatctattgaaaggcgagcaagggacggactaaagaagacagtcggactgcttttaccctaactcaaattgagaaataatggaagtaattcagtctgggcctgagatgggtctcccccattcccgccgtcccctgcctcccttcctgcttagctagaggcttctatttcagccctctgcctctgaggcaggaggaacagccagggagctgtccccacgactgagcctctggccttgcctcacccctcacccagagtgactccctagcggagaatctctgtaggagtgagtgccatatccctgtaatagcctgcttagtcacattgccccaaaacttttattacacagcatcggtgcctggactgttcaattattcatgtgtttcccattccaagtatatgtttggagaagagctgatcaaaaagatgtgccctggatgtggagaccgagctggaagggcggccagggcccaggcactgtcaactcacgtccccacagtctcagttctgcctctgctcactgaggacctcgcacttggtgctctttcctgaggttctgccatgagctcttctactatgaccacatgcactgacctttgagtattttcagcttctttgggatacccctgtctctttgctacaagattaaaaaaaaaaaaaaaaaggcaggcaagagagaaagaaaacctaaaagattctacctcactaggatttaccgcagaacctgggtttcaccgttctaggagcagaagtcaccaacatccacacaagagataggcctgggctgacacggacaagacaccgggaagggaagacaataagcaggtcttttcttacagtggtcagggcctgtgcagaacagtttctcatgggagaggggagcggcgggtgacaacaggatggctggcaacgggaggcccctttatagggatgttactgcaccgagaacctgaatgacaagcaagagctgggcaatgagtttcgatgaccatgccccaggtagaagaaacagcaaatgcactaagaaattaggtgatggggcagagagacaatgaggtacctggagtagagtgttgtgttggaggggtaggtgctgccagatgggaaaatgcgcaagtctatgctgatgggaccctggagggactggtcagtagtttgggcaccaccgttggtgtgtctgtaagctgtggggtggcgtagagttcaatcccaccgtgtacccttcacacacgcaatgcacacgtacatactaacccattatcacaggggagatgtactctgcttggattaggggggtggttcatcctctttgtcagttggctggaccttagaatcacctaggagacacacgttggtgtgtctgtaaagctatgtggggaccggtttagctgagaggggaagatccctcctgagaagggagcactccagaccaaataaagagggaggagagcaagaatgtgcagggagcaccagagcccatccttctttgcttcctgcctgcaggcacagtgtgatcagcacctccggctcctaccactgtgccttcctaccctgctggacttatgacccaaagttaaccctctttccttcagtcatgtttgttgagtgttttgtcatagcaaccagaaaaatatcaggtacaggttggggaaatatgcttctataattgatggtttttcgatttatgtcattatgtgttataaacaacttaatggagaaaagctttgttctggttcatggtttctgcctatggccagagatctcagtttcatttttttaaaaattctaattgtgttatttgatgtaaatgggtgttttgctcgaatgggtgtctgtgtaccacctgctcccattgtgcatggaagccctaagagtgccctggagcctctgccatggaagtcgcagatggttgtgagccgtcatgtgggcaggggcccttggaagatcagtctgtgccctttaccaccgagtggtctctctagcctcttccttagttgcagctagactgcagtgaggtaaaacatcacaggaaggaatatccagtcaggtggggctgccccctcatggttgctgaggacctgagaagtggcatggtgggcatgagacactttaggctgccccaatgctatactctctccggttaggccctgcctcctagcttctactatttcccaccaaggtatgaatccacaatggcctattcttgtcagagcccccatgatccaatcacttcgcctgaaacatacctctgaacatttcactgggggccaggccttcaaccccccgtggcttctggggggacattttctgttcaaaccagaacactgaccattgcttcaaaattgacgtcactttctcagaagtaccaaagaaaggactgggatggaaaacaatgaacatttctttgaatccctttaataaaatgaatacctgaaatggaaaagtactgtgtacatcatgcttgacattgacctttcaaagccaacctttaagacatgtcatgtcatggctagaagtggttcataataggaaagaaaaatgtggactactttcccattgaatgcaacacacacacacacacacacacacacacacacacacacacacacacacacacacagcatgtgcatgcatggggtcacacacacacacacacacacacggtaagcgaaggcatggcttggcttgaagaagcaataatatctggggactcactattggtatgactacccacctttgcaaaaggcacaggcctccctcagagggctagaaaagatcctcattctattgggttatttaaccactgtggtctctctctgtcctgggagaccagtgaccctctaggactcagaacaagtgactgccctgtggggttgacattaaatgctttaaacacccttttcctatgcaatattctgccttccctttaagagaaaatcctgagacaaagcaaagcacaattttcattatgaaattttggatatgtctaatatggctaaaattatgtagcaccattcttgtataaggtcggggttttgaacttctgttgactagcggcattctttgactctatcatatccatagcagtgctagtttaaaacaagtgtgtacagaaggtaaataaagccctttccaaaaaaaaaaacaggcaaagttaatggctgaataaaaccatggtagacttagtcttgttcaaatacaaaaatacacaaaacatgaattgcctgtaaatagatttttttaaaagccagtcatagtatgcatcctcatctcatttagattaaagaaacaatgaacatcaaaataagagaaaaatagcaccaatgtcaaatattacaaatgggaggggcaggttgtatcacatagaagaagcaagtatataaccaagtaaaagattgagtctggagccatgcgtgtaacccatccttatatatttacattcaaagtcaccagggccttaaataagttaactgttaaaatgtcatttcacctcagagagatttcctttttgggagtagttgaggaatgacaggctgcttttgttgatatggaaaaggagagacaatgtagccacatcctgtaaacttgtgactatctgggcaacatctgaacaaaaaaaaccaaagacaattgtatgaggtccccctcccaggaaaattcaactgtattctaaccatggacagtctcctgggtaaggggaccagctttgaagcagaaacacccctgaatgctaagcctgacgtctccatacctagcacccacagctaagacagatgaccaaataattaagagttgaatgattaactctccccaggccactgtcctcatcttcagagctggtgacagcacacggctgatgatcctgtaggaccctgtgagtgagtgtagctcttcctgtggtgtgggctgaggagtgaagtctcactgaagactgtctgcagctggggtaagggaagggagcaggtcagccgtgagcccaaacttagcatgtgggagagcttgcttcaatttctagcgcccataaaaatagtaataacaactgtagctggtcaccccttcagggtttagattttttatttgttattattttataagtgttttgcctgcatgcacgtatgtgtgtatgcatgcatgcatgtatgtatgatgtgtgtttctggtgcacatggagggcagaagaggctgttaaaacccccagaactggagtcacagatggttgtgagccaccctgtagacgctgggaatccaacctgggtcctacacaagagcagtcagttctcttaactgatgagccgttgctctagccccacccaccctttcagtattgaatccactgttctttcccagagcataaagctcacagaaaaaactgcatgcagtgtgaatgccaagctgataaaagaatgcacagattgaaaacctggattggaaatcaggttgctaacatccagaagcccttgctgcgccactataacaatgccttttttaaaaatctccattagaaatatttctttgcatatgaagggtaattgctgtttaatttttaatctcctaactcacgcagcagatatttccttgctttgattctaattctttcaacagagaaaaatggttctgttcagactcaggagcttatagtcaccaagtgagaggggctgagttcttatttgtccagaaagacagtgtgcagggactggtgatgtgacagccgcttgctccccagtggctcacagccatggagaaccaaggctcactctctcgcctccctgcctgcctagggagcccttcatgcctccttcctatagagaataatgacatttacacaaacaaaagtcatacaagaaattgctttcaaagccaaatgtgcactcttccagagacaagaaggaacagggacagggaagtgcttggcaccatacagtggcttttccattttaattattaattgctacaactccccaacagtctcctcctactcagaataatccttaactatgtctctccataacacagatcagcaagaagaaaacaaaaagaagctgataccagagtgtgcttcatgtctacttggaagagaaataaatatgaataaaatctaaaggagacccccccatagaaaagcttaaaattcttaaataccccttgtaggggagactgtagccatgcctgctaggggctggctacagtggctacagtctcccctacaaccctttaaggagggagagagaggaatcggggagagagtgaggcattctacaaagtgtatttgcaggttgtgtgttcaggtcttctatgctcatgcttgggcacgatgtgtcttgagccccattgtatcatcattggctttatttgactggtgaggaaatggccaggaaggagacaaaagatgaccttaaaggcaggaagtgattatccttccctgtcatgacaccaggaagatatcattataagaaaacctaacaagaggagcccaaacgtttgtgaaacaaatagaccagagctggaagggaattttacaacggaagaattaagagtcagagatttcagcaccatcctgaacaacgcacagaaacagtacatgaaagcatcaaggctatgatgaggccacctcactgcacttggtgtaagtgcacagctattgcagaatgtatattcttttcaggcacataaggacagaccatgataggtgggaccctggataagtctcagtaggtttagacgattaagatcagaattaaggttaaaaacaccctctgatcaagttagctaagaatcagaaacttaaatcagagaaattcccaaatattgagaaattaaaaaatactctcaacaaatcacacggaaaaccagatgatattagtaacaaaaggaagccagaatataacgtaacaatccacaatgtccgaggcaaagccatacttacagggaaactcatatgttctgttatcattgttacaggtgtggtttccagtcctgggtagcaaatgtaggctctcacactttcgccagaactctgcacatgagctgaaccctagtctgaaaattcatgattttaagtgcctatgctaaaaataaaatagcttcaaattagtgatattagtttcaatttaaagaaattataaaaaagcaacttgtaatgatcaagaaaatcaatatattgactgtcctggtcagctttctatgactgtgatgaacaccatgactaaaagcaacttggggaggaaagggtttatgtcatcttacagttgagagtccatcctgaatggatgttgggacaggaactcaaggcaggaacctagaaaagagaaggcacaagctcacaaaatccagttcaaaataggagcatcactacgaatcctacagcaataagagaactctatggaaaggtcgtgagcaatctcattccaacaacttagaacaataagtaactcatttaggaagaaataaacttcctgaatagacaaataagtaaattagaatttttaagttaaaaattttgtttgacagaagcccagacagagataccaaattctctctatatttaaagaagtaggcactagaccttcatttttttcccccagaaagtatagacgtgaacactttactgtctgaagttaatattatcctgatactaaagctgaataaaaacatcacaagaaaagaaagctctggattaataaccttcatgaacataggcccaataatcactgccacaatactgacaagttaaatttaggaatatgcaagattgattgcactctgagacaaatcatgatgtcacccagaatataagggtgactaaagacatgagaccacacccatgatgaaaatatgagggcaaataacaagatcctctcaatagataaaggaagagcacttgacaaaatctaagatccattcatgattttaaactctgcacaagagctggagaaatggctccgccaggcccaatcagcaagttctaggtcctagtgagagacttttgtgatccaggttctctcagactgccaactcccaaatcatgacctagagacttattaattatgaatgcttgtccttaggttgaggcttgtttctagctagatgttttttaacttaaattaacccatttctcatttgcctcctgttcaccctgccttcctgcttcctctgtgtctgtctgtctaactccgggttggttgggccctggctgactggctggttccccttgtctctctgcctaccagcgctgcctgtccctcctaagtctagctattggccattcagctttttattagaccaatcaggttccttaggcaggcttggtgaaatagtaacacatctttacatagttaaacaattattctgttgcaccacacttttgtctcagaaacaagggggttagggttggtggtgtatgtcttgagtcccaggactggagaggcagaggcagatggatctccatgagtttgagaccagcctgggctacatattgagttccaagccattcagggctacatagtgaaaccgagtgtgtgtgtgtgtgtgtgtgtgtgtgtgtgtgtgtgtgtgtgtgtgtcagtgtaggtcagagaacaacttggtgggacaaggaaacaaaccaaacacaaggagtatggttagagttagggtactgaagtcagtacctagggttggcctttggccgacacaatcatgtacttactcacctgtaaccacatacacacagacatacacacaaatctatgcatgttctccaggtgaatagaaaaaaaactttctgccaacttgtgccgatcacataactctccaaatgtactacaacgatttcatttaatgctactgattttacaggtgtaaggctcacctcagtgtggcttttataagaatgaagagaggctaagatgcttaacttttatcaggggagtgctgaggatgacagcggttatgttctttgggttgttgctcattagagctgctcaacctatttttagttgattactccactgatttaaaaacaaagaggaataatgctcccaggatggtgcatcctccagcctggtgcctgacctgttctggggcatcgtgactaagtctcttcccccaaagcagctttctgtccccactccctcatgtcagctcctttgctcacattgcaccctccagtcctaggtggggttttccacatgtgtggagcagatgtgtgatagaagcaggcagcgagggcgtcagaagaccgtgagggcttctgtcagacgtcggcagctttaccttacatccatggagtctgtctttttctctgccttcctcattgaaaggtgactatgaaagctcttgtgactcagaacttttcccaaataggaattccttgggtctacacttaagagccaacctcatgtgggagatgggaccttcacaagtaacggggctttgctcctgagtacttcagtcagtactgactcagtaccgtctctgtgtgtgccagatgttgtaggctttggaggtactgtggcacttaaaacaggctctagacttcacagtttctgggaaacaatccacagacaaataaccactgaagttttgaccacgtgggtttgggattccctggaaggctggaaaggaaagtgtggagacaatagttaccaaatgggaggctagcagccatgacttctctaacgagacattagagtgtgtctgagggaaatgagagcaaagaagaagcaacccatgcacaaagaacaggaaacgagtgagactggaggcaggagcatgcttggtactaaagcaagacaaagaaaggcagagcatggctgtggcaggggtgtgaggcgtccatgacagagatgcccctcaaccaggtggggacagggaaggcaacattacagtaagagtcaactgagagctgttaaagtgttttgagtaagacgtgacatgatgtgacttctacttagaagggaccactccaagtgccgggttggtactgacagtagtggggcagaggctgaggaagacaccatccaggcaagaggtgacagtggcttgtcttaagaaggaatcaccaacacagaggagaagcagccgtgctctggatgtgtttctgagggagtgccaaaaggattaactgatgattagatacagggaattgagagaccgagaagagccaaagatgttactttaatcatttagcaagagtcaatgtagtaattccatgctgggcattattccaggttcatggcaagcactgatcatctcatcccggcaacagccctgtgagataggcactgtttccattctcatcttcctccttccgaaagtcaagaagggtgaggtcgttgccattttcctagagagggaagatggaggaggaggttcagggtggtacatgaaggttggtgttttggttgggatgattgacacagcttcctgaaggtattgagcaggcatctggtgatagaagtctggagttaaggagcgtggtctatgctggagatgtgtactcaggtgttttacaatttggggcaggaccaaaagccatgaaatggacaagacctgtaaggaagtatagatacaaaagagagaacaacccaaaccaaccttgcaatagttggatacaatgaaacaaggacaaatgctcacagagggcaaaggaatggcgcaagggcttggcatcttagaagttgagctgaggaaggtttggaggaggaggtaaatgttggcatgaaatgctgcagatggctcaagtaagagtgaccagaaggcttactggctgcgctggaaagacctgtctcattaaaagagaggtttgagtataatggggacccagagaaagagtcaggagacaataaaaatagtaaataagtaaaattctcttgaggttttcctctcttcctccccctcttcctcatcctcctcatcctcctcttaccctcccagctcctgctccttcctcctcctcgcccccacccctcttctttttggttttagtcactgtctcattctgcaacttagaggtcactatatagccaaagctggccttgaactcctggcaaacctcctgccccagccttttaaaatctaggagtatagataggagccatgatacctgtctcaaggcatttcctatctcaagaaatatgacagaatccagaagaaaatgcagggctgagaaggtttgttttgtagataaatgaaataaaagcatattcctacgcagataaaattggtcaagtggaaaagacaacagcatatattgaaatgggagctggagatgaggtggagtcagtgaggagacgccaggtgttaaagcagaggcttggctttacccggcggcaggggacatccgtccatcagggaaaggaggcgggctgtctgtgggcaagtccgttcacgtgagagatggagtcatttgtgaaaggtctcttcttgctgcttctactgaaataatggcaaaggtcataagttcaagaaaggcgcattggagctttgaggagagagaagtaatgaaatgaacccatccagaacttcatccaaatcacaggtcaacccacaaaccactcgagtctctttcgtggacctagaaaagaacttatgtttttcaggaggcaatgtaaacacttgaggtgtccacgtgcttcctaactggtttgcatgacctacctggaccaggttaagcaagaggtgagccagctgaaagtaattctcttgagtcaagttgctgcttttcttggaaaatctaaattttactcccttctgtttttttaaaaagaaagtacattgtaaaatgaagagttgagcgtaatgagtttgaaacgctctgcaaaggctttatatggttaaatccatgtatcagaataaccattcatcaaaccacttctgttctcttagaaataagacataaggtaggccctttgagggaatccaggagtttgtgcggtgagagacatacattcttaggaaggcagtgattggcttagactggcagttgtaaatacatgtgttttttctgtgtctgtcaagcttaggcatatataacctaatcagtctcgtctgaagtgatggttgagcaagaacttaattacttgccatttcttctaccactatgacaaaaaataaaaaaataactccatagctttcttgttcaataatgcagggatctgatgacctgtagggtaagagtccgaaggtcttggtgtagcccttaagagtgagttagtgctcctaccccgtggtgtctgctcccaccactcaaagccaacactctgaagataagccttggtaggactggacttgttcaagggcctgccatgacaaaacaaggtgtacagcaccctcaattctgtcctggaagtatgtgaaagagcttcagtagggctggatatgagatgcagggatcgtggcgggacggttgtgtggtcagcagggtctgcatcgaccacagtttgtctcctcttgatcctgcagtgggcaggtgagaattgactctgacctcccgggaccagttaccagcaagcatgttcagtaagctaaccatcgcagaaatttactcgctccgtgttaggcaatgcagggcattaaggaaaaaggggaaatcacacattgtgatgttactggagggtggcagatgctccaggtcgggtgactctcaggacgattatcatttaatatcttaattgtttgggtgcagctttggtttagaatttaaattctaggcaaagggggaggagccagtctacctctctccgtagcaccgtgatgtggggaaagcctcctatccccagagacagctctctgctctgcaggtcttgtgcttctcctgaaggttgtgaaatgaaatgaagcaacatgtcacaggagatgcacaggtctgtgctggggacattgcaaaggctatcattgttaatcattctgaattatgtgttgtcacttaggcctggagagagagcaagtgctaccccgaggacttgtttctacgtgttatctgatggggaaaacaaactattacccactatgctccaattaatcactacagatgcttcatttctggccatcaaagtgagggtggcgcgtgcgtgtgtgtgtgtgtgtgtgtgtgtgtgtgtgtgcgcgcgcacgcgcacatgtatgcatacccatgagtacgtacttgtgtatatttatgcatgtgtgtatgtatgcatgtatgtttgtgtgtgtatgcatatgtgtgtctttgtatatattcatgtatgtgtatttgtgtatgtgtgtgtgtttgtatatatacatgtgtgtgagtgtgtatgtatgaatacccatgcatgtgtatttgtatatatatgtgtgtatgtgtgggtctttgtatgtatgcatgcatgtgtatttgtgtatacatatatgtgcgtgtgtgagtatgcatgcatgtgtatttgtatatatgtgtgtttgtatgtatgcatgtgtgtgtatatgtatgggtatgcatgtgtgtgtatttgtgtgcatgtgtgtgtgtgtttctacaggaattctccagttctctctcatcattcaccggcctgttatcctatcaccagcattccgacactaggaccgccttcctcctcaggtgccatgcacaggtccaggtccaggtccttaggttactccagcttctgtttctcttggcagcagtcagaggtcttatcgcccccttcttgggctgaatcctagtgagagcaggtcacagagccaaagttgacttactagactaccacgaatcactactaactttattaaaggatagagctgaagggccagacgatgagctgtgtaggaaaagccatgggagaagtgatagggctgtctgaactctctgggaactccaccccataaataccccatgtgtgtgggatgtagaagctgtacaccctgatctctttgggtatttgtggaggcatcctgatgtggctatgagccattcattcaatcattgctcgatggtgattaactcaatctcttgccccttcccacttcctagacatcccaaccctccaaccacatacatgattcccatggcaaccacacatccacccttagggactttccaaaagtctcctcattaacataaattcacaaaggcatttattatgaataacccaaggcctttaaacttttatcatttacaaattgttcagtgtttcaggagccctggctagaaactgagagtggagactaaaatatatacttcttattatatcatggcatccgacacacagcccaaagaatcaagcagcatccaaggagagagaagactgttgtgtgcagggcacacagctgtggttttgtccccttggcaacatccacatagcaagaagctatatagtttgacgtatgtctcgctcttctcgagttttcctaagactagggaaaccttagccaagtaatgaggaagacatcttcattttaccgaaacatttccaagtcccagaggagtgaggaccatgtgtctaactgaatacaccagtaccgcttcaaaactcgttaaatgaaggaaaataattgaaccaaaatgtgtgtctttccccaggggttgggtttcaaagcctgcagccacaaggtctgtctcacactggtttggccctgggaagtgagtgggtgtgctgggtttgatgacagccttcaccctctgctgatgccgccatttgaatctcgcagctgttgaaccgcttgtgtcttctgtttccatttcaaactacgagagcacggcaaaatgcacacagccacatggagacccctatggggcagtgtgtgctcttatcagaacactcagcaagagagccaagactgcttcacacgggcctgacccttgtgcgccattcagcccacaccccacatgctttaacctatggcaaaggcttaagagacccaggtcaagctcaggtcccgcccctccgttcactgttaaccagtaacccgattggggatccttttgtggctgatacagggtacagtcatggggccatatgtcctttataaccatccaaagtgtggggccatgcccatgcttgtcagctggtgctgtgacccctggcctggcctggcctgggacttcttgtttaggcatgtgagagtctacgctgtggttaccagtgcagcttgcaggctatgctgtacaaggttgccagcttctttatttagccacgaaccagttctttcaacaagatcagacactaaagtccaatagagacttaaaacaatgaagtctagaattacctggcacgaagcagaaacagaagcaaatgattgatcctaaggctggtcgtcttccatcccactgaaaccaaaccttctctcagatacatacacacatatacacactcacacaccattacaacacatacacacactcacacatacacactcatgaacacatatacatatgcatatactgtctttctcacacacatactgctgaggcacacacacacacacacacacacacacacacacacaccctaaggcagacacagaagcaacatgtcacagnnnnnnnnnncaacacgcacacacacacacacacacacacacacacacacacacacaccactccactgaggcactttgaagaagctccagcactcaaatccagggcaattggaaaactactgatagtcttatcattcacattacagacaaggaaactgatctaggtctttgctgtcttcttgtcataggtagacacagatggcccccaaatatttgaaatggcgaggccgagcaggggttagcctgagcaggggcatgctctaagttgtaagatacagaggattttaaaggtgagttacaaaataaacaggagtctaaactgtcattggtacattatttgactgaagatatttatttatttatttatttatttattcatttatttatttatttatttatttatttgtgaagacgtgtaagtgcatgtgtctccgtatgtggagtggaggtcagaggacaagttgtgcaagttggtttccatcttccactttttgtgttctaggtcatcaggcttgaccgcaagtactttcacccaccaggccacctcattggcctagacgaggttcaataagaaatgtaggggctggagagatggctcaacagtaaagagcaacggctgctcttccagaggacctgggtttgattcccagcacccacacagcagctcatccagctataactttatttctgagggaccggatgccctcttctgacctctatgggcaccaggcacacacatggtatatggaattacatgcacactaagccttcataggaataaaataaatattttaaaaaagaaacaaatgtgcttacaatgaatctcttgaattgctttcttaataggatcatcagaaaattcaaaatgacctaagtggttctcattaccattgtcttgtcattccatggggcactcatggtctagatagttctaaacgccttctccaggggctcctggattggcggtggtaggtcatggctcatggctcctaaccgaatttcccccctctattttcttatttcaggagtacgtgaaccattgttcacagtgatggccctggacagccccgttggagagcatggggtaggtgggttacgatttctttggtggggcagaaactgtgccatggagtaggaaaccctgtgccatggagcaggaaaccccttagctcatttccctctccctgtggaagtcagcagccgtcttagattccacttttctgtaaagtgagggcatatgtttacaaacacccaaatgtgagctacactatagccactccctaattccttcgactgtggtattcttgcatcaactatgtgtctttttcctcaaagtcatctcttcctccaagccaacttcagcaagccaaagtacccctcccagggaagacaagaaagaattgttttccttcccccttgcttcccaaaaggccatgaaagaatagctacttgctggtcactcagtaaaggtacggggggggggggggggggggcaagcgaaggtgtcttaactgtgaagccctggaaagcaggaccaggcctgtcctggagggatggggaatgactgtcacaggcaggacgcaggcacgctacccagcagcagagaaatgggcagcggccactgacagtttgtttatggcccctgctttttatttatggcatgatttaaaaagacatggtaatggaggtagtggaacacatagatacccagactgagagaagcaaacagttactaaactttcggtcctcatccccagctcctaggaagcagaaacacgcagacattgttttaagtcagggagttaccagctgggttccctggcagaaacaccagacaccttcaacgagtgagagggaagttttatgtcagaagttccctgtttatgaggcagttatagctggagttagctggtaccttagggtttataatctgtttctttctttttcgttttcatttctctgtgtaataagcctagttgttctggaactcactctgtagaccaagctggcctcaagttcacaaaagatgctcctgcctctgtctccggagtgttgggactgaaggtgtgtgccaccactgcctgtaatgctttttttcctgtttgatatttttgtctccgatgcaacgatgacactagaagcttctcttgggccacatttgacagggtttaggtcagagtcatgtgaggagtgtcccacgaggctggtctgtggcactttattgtgtgcatttgcaagacagcttggactagagtctcttcctgtgactgagacccacacctcccccaggccttgctgtcctgtcttttttccccacccagcttcttactctgggactgtagtcaggaggaagcctctgtctgcagacagtggtatgtctcctgagaacaactatgggaggccgaggcttcatgcctggaagaacaggtggcagtcaccaaatgtcatcatcctctctggctgcccaactggattgtcatactccaggggctcacaccagaacttgcacctgattcctcagaactctgcaggttgcaatgctgagagccagacgccagcaagcaagccagtttctttggcaactcctcggcctggcttgcaagtagcagctacaccctgtacgtctgcgtggtcttcccacttttatatcttctcttgtaagggctccagtcatattgcatgagggtcaccgtgtgcccttattttaatgccaccatttctttaatgaacctgaacccgtggcactgtgggttcagatttcaacaacacaccaatcaagaagggaacccatagagcccagagcactgactctggagctggggtctcactgtatccacagccccatgagacatctgaataacccaagagtgccatgccactcccctttcttacaaaaatacccatctcaccagcctctcttagagtcatgggctagtcagcactaggacctcagttcctggatgttgggatgttttctggaacattctccttagggactccaacattgacaagctggtgtccaatgtgcttcttaccaaaattgtctcctccggctggctacccagctcagttgaagcagacacagtcccagagaaccagaaatgtcacctgacctagtgacctaacctttagtctgggtatcccagcaggcggacgtcccctgtgggcatgtgtttccaagggttctgcagccagtcgtctctgcattaaatagatactggaaatggacggatgtcagagtttgtttcgcttcccataactccttaaaagcaattccctggtgacgccagtggagaagacaggatcctgggtctagacaggagcccctaggtttttttttttttttttttttttttttaaaagccttttattcacgtccctccgtccctcctgaaccagatcaacatggtatccagtctcctttgccctgagccctgcaagtcagctctgttgtccaggatccctcttctgggatcattatgtaagcacagctcttgtaactccctgcccagagacggtgttcctgggtggtcctccttgggtgggtctctgggcatagaaaccccaggccacatttcctcctgggctttgctgagccctgcaggtcctgcctggtgcagctcagctctagctaatttgggagattaagatcagagaccctgtggaagggccatgtttttaacaaggcagaaagcacaagctactcagaagtcaggcctactgtgcggaacacgccccaacacacacacacacacacacacacacacacacacacacacacacacacaccacaccctggctctggggacctctcccataaagatggtatcgcagggtgaggaaagagtcacccggctcccagcaggtttctagtcagagcttcactttcaattaccggcagcagctgtggaggccacttatgtaacgggctccgtgcctcctccttgggaggtggggaaccatttggtgtgtgctaaataatgagtcatggtcagagtgagggagcagagagagcagatttctcccttgtattgcttcatccaaacctctagtaaaaattggggagtgaatcagaactggcacgcttgccagagacaggaaagcaccgccgtggggacggagaggggggactgaagtggaggtcccctcagggatccccaagggctgctgaaggaggctttggggtgggaagcccagttgggcacttgatgaggagactcacatttgtcttgaactgtgtctgaccttccaagggctctctgtccccagaagcttcaggcctttgccaggcccagccagggtccgagagtcatggggtgaaaagacagcccgggaatgaatagaactaaccctaaaagggtgaagtgtgtctgagggcaggacacactaacgttaacaaagaagtcaaaaggtttggtttatcaagggttgggggagacatctgatgtccctattgtgaggtaaaataaaaacaaaaaagtagcacaagggcttgtctcctttcacgtttctgagaaatccagtcaagatacacagtttctgggccaccaagatagaggcaggtgaaaacacttgcccacacacctgatggcctgtgttcagtcctgcaggcctgtctcccaggtgattccacagcccgcccagttgatgtcattaactgtcacggtggaaggaaagtcagctctgtcctccagaggccctcggacaggcacgcacaccctaaggaacacaggtaaatatatcacttagaattatagatttatgtcagccaataattttttgtgactgccctgtcccccacaacaccatgcttttcaacatggatggcaccaagaagccagtgcccgtcctgtctccacaggaagccccagctgagcccctgggaatcaggagagccgccttgtgcagggcctcttatggaactggttagatcagtttcatgttgtggtagatgcagtctgtgttcagggccactgccctgacgaactgtgtggtacttaatattatcaggggacaagctctggagtcacctaggagacacagctctgggcgtgtctgtgtgagggagtttccagactgttaattgaaaaggaaagaccctccttaactgggcagccacatcccacagggaataaagaggagagagcaagagctgaacaggaggcacccatctctctctgcttcctgcagatgggatgtgtcaggctgcctcacactcctatggcctggactctgtcccccaactgtgagccacaatgaacctttcctccttaaatcacctttgtcaacgttctgtcccagcaatgagaggtaacaaagtagtaggaaaggttttattcagtgtgcaaacctctgagagctgagtccctcccagaagcagcatagccagaggtcaaaggtcaaagtgcctggataggatccctgctctgctacttatccccactgtatgggtcatgggacactgagagcctctcactaacagggcagtttgaagactgaggtaaaacttgtatttagagttggagttactattaacccttgtaatcataaccatcattttattcatttatggcctggaattcactctgtagaccaggttggccttgaggtcagaggttcatctggcctgtgcttcccaagtgctgggattaaaggcatgcaacaccactgtgcagccatcatcaccattatttaatgttagcgttaatttacgatattagcgacatctataaaaataacattagaacacagaaacgggtttttagaggtagcaaaagtgttcttcctcaccaagtgggaggccatatggtattagtgcacagattcaacaaaactgagtctgctaagctcagaaagcaaccagtgagtgtcaggaccacaactgccaactccgtgtggtgaatcagcacacacagaccctggagttctttctcccgtgtgtccaagtttcaacccctgcccaggtcacagatatttaccagtgccgatggcttgaaacatgagcaagaagtaccagccacagattctaacttgacacagacttctcaagccatctattctggtgttggttggaggaaagggaggagacaagagggaactgttcttagattctctactggtggctcttttagcttctgctgttgtgactgatttctgttaactgaccacagaagtagaggacgtgctcctcagaccggcccttcagccctttagcgctaggtggatgtgatatgcactgtagaaagagctccggcagctgcacacgtgacctaagcaccgccatggtcatcaccccgcacagcactcacctgtaggaagtgctccctgtgcactgtaggacttgatccatgctcaggtcttatcttatgactgtgccattggttcaccgctgtctccatctgaagactgggagaagcctgttctgtttgggaccccagagctgtgttacatgtagtctagggctggtcttgagagcactctctgaggtgtcctgtccctgctgtgggagtgaggtcggctactctccctgcactgttcatgtctgctgagctgccacggagggccttctgggtcagtgcccgagtccaggcagccagtcagcatctgtgaaggaacctggtgctgacaggatggaagggagtattgacatccctgggtgctcagtgtgtggatgtgaacttggcagagacattttagctgaccaggctaggggcttcctggtcctttgtgtgctgggctcctccaggaaggaccccttgcttgtaggtctcagggctgtcatttgagatgggcgaagccaatggcttcgacaaggttcttttcttgaaacagcgctgatttgtccagttttgtggcttttttatgtggaacagcattagatcatccaagcttgtggtttatttgaaaacgaaattccggtaaatctttcgcaccatctggccgtgcggtgattggctgtgagttaggaacaagccaccgagcacacaagaaaacaaagtgacagaaacccgccaggaacagagtggttcttgtaaaatctgtgcccagatcaacccacagggctctgaggatgggtctgaacccttgagcagggctgaagcctgtcactcctgaggtgggaatccattcctctcagcaccaggcccagcggaatgtctctgctcaagctccagccagagccttccattttctgagggcacacacaggctctggacaccaacacgaatgaccaggagagaagtcacagctaaacaccagtacttgaccctttggagtatgagaacaagatggatccagagtcccccgaggacacaggagatgccactctaacttagctgtctgtcatacccaccagctctttgctagtgtctgtgacatacacaacagattttcattcctgtgctggctgtgtggattgcactgtcccaggcataggagagacaagtgtggaccagatagatacggctgttgtgtttagagagttttatgtccagaatggcagacattttccaagctgtatcatttaaaataatttcaaactcaggaggtatcacgggtgcagaagcctgggttacccttggaatgggggagtggcagcctgaggcgcagccttggggtggcctggtggagaggagagcctgctgagatagtcccagagcactatgggatgaggtgggagagggagggggccacacccatgggctgtgtgaagctggtccccacagggaagaggcatggctcaactgggaagaaagtagattgtagataagcagagggagtagaagggacagtggtggcttgagaaggcacacaagaggaaaagcatcttaggtaaagtgtgaaaatgctgctgatgtgtttgatgtggcagaaaaaaatcagtcgtgaaataatgatgctccctggtcctcctgcctgagccactgggagggtggagattccagtggctgggagtagagagaccggagagcgtacatggtgttaaaacaaaggtttaagagcaggtgttcattgtgtgaagtttgagatgatctgatacttctaagtggaaacagaaagcatattttctagagttcagcagaaaaaaaaaaatgaacaaaagagtgatcagcatgaggctgatcactggaccaggagaagcaggcctctgactgagcagagggaaccagtgaatgccctgaatgcagaatgttaggggcttctcacaccctggcctgcaaggagactaggggagagcagacatgcggggtctaaccctggccctgctcttgccatgacctctagctgctatcaccccttccacaaagtgtaccccctcgactaccagtcatgaacaagtccggacaaagtctcaggccttggaaatcaaccctgagctgtttgcacaggaatcccagagccacagtcatctggaacatagtgtccaggggatcatttatgggttggtcaggcatgtcctaaagactgtggactcttcacttgcctggatgagggttagagcaggtgataccagagctggaacttttaaagcttgaggcatcagacaaggacctttgttgctaaacacaaggctagcatttgcacatgggacgtgtgtggggtgacggggctctgatatgaagctctcggaaaggacctgatttactcttcctgctgtcctgtggcttactcctgcttactcctgcagtgtcttccttgtggtcagcgtctagctctgcactgaccttgtcacaattggagtgagcaccctttttcagtttacctcagctcttgtcgagggaggaggagaaagtaaaaagcagggtgtaggagaaaggggaaatccatgacagatggactcctctgccaagttagccagaggcctgggcagctctgggctattcatggacgtttaacctcagagattggtttggcacaggttcagggacaagccatccctcaagccatgctttcatgggacattctacagagcagtggcgtgcagggacacgaaggacagcataatttctgtctgtctgtctgtctgtctgtctgtctgtctgttcctcttcttcctcttcctcttccccttctcccttcccttccttctcttctctttttcttcctccacctactcctcttcctccctcccctcctttcctgttcctccttttcctcttccttcttcttgttttcttcatagcaaccgtaatatccctgtagttaagcaaggccacccaagggctgtccagcggaggccaaggatccatgcactttgaccccaagggctaggagttagcaagagctggtctgaggtttaggattgccttctgcgcttggtgagtcaggagagagtgggaaaggaaacttatctcagttttttgtgagtgaggtcaccactggggaggcctgggaatctgagaatgagttgtccttgagtgtcctcagcagcccatccttccagacctggggactgctgactacgaaccaaagttctttatgcacagggcttgggcgtggttggcgagagtcaaggttgttctccaggcaaagcctgcattgtcttctcagagactcagagccagcagccctcctaccaagtccagcactggtccgcgctgtatgtgccattggaatagttaaacccatagcatctgtccacgtaaagcagacaaacacccgataccatggggctttggcatctgtgctacacaaacgtcctcctctgcctcttcttcctcctccacctactcctcttcctccctcccctcctttcctgttcctccttttcctcttccttcctcttgttttcttcatagcaaccataatatccctgtagttaagaaaaaaaaaaaaaagtatgcctgtcagggggaaggtctgtgagcgaggaatgaatcagcatgtcattccaaaccctactagtggcatattttgtggccttgggcaagtcacccaatctgtctgccacttccttccaaactgagaggcaacgctgaaaaggggccgggagaaatcatcagctcggtagaaagatttgaacaacttggttccatgtgcacaataatgacccctttctacctaggaggctttggcccctctccttggttcacttttggtactggatggatttgcaactaaatgggagctctcagcagcctctgcccgtggtccagcctctttctgatgcgactcaaagaggctttcagtagggcccaagtcaagacctctttgcagcaagtgttatgtgaaaaagaaatcaagctatacttctctacaaattaaggcagcaggaaatgtgtgtttttaaattgtggtcttgaacttcagaagttcatttacttcaaaagactggcctgcctctagggttctgctccgtgtgtcatgtatttaaagtgcctcatacgtgcttacggccagttatatgagcacgtggatgtctaaatcagagagaaaaggaaaccctgctggagttttattctgtaattgaatttagccagaatattcaagactgcaggtcagaaacccccaggcacatatgatgtttctggccattctcttttattctgactagattcaagctttgcttggattgagatgaaacccaaaatagaggctctgtgtgaaacactgggtgcagtctctgtgaggcactagtcctactgggtgcacacagggggagaaatgacaccaaacactgagcactgtggcatgagctgacagacccctagacagcatgaccatcatgctcacagatagctagatgctgaggttttctgtgcggacacaggaagtccataccattcatccattaatactctttgggatcagtttaccaggttaacttctaagcctacagaagagtcattggtggatgtgggtcccagagcagccacttcagaacaaagactagggatgttccagaagattctatgcaagctcatagacctcatccttcccttccaccatgaggtggaaggcctctgggcatacatcctttcttcataaacccagacgccatctctaagagaagcaggtacagagacaggtctccaaacagctatattagtgactttttttaaatcaccatgatcaaataactgacataagaaactcagaaaggagcgatgatgtggggtagtgttcttgttcactgtaaagatttgtcactcgtattggtttaataaaaagctgattggccagtagccaggcaggaagtataggtggaacgaccagactaggagaattctgggaagcagaaaggcagagatgcagtctccagccagacctaaaggaagcaagatgagaacaccttactgggaaaaggtaccaagccatgtggctaaacatagataagaattagaggtgaatttaagttgtaagagctccttagtaataagcctgagcaatgggccaaacagtttataattcatataagcctctgtgcatttatttgggactgaatggctataggacagaaacttccatctgcagagtgggtttactttgacttacagttccagaagatctagccgaccctggtggagaaggtgaggcagctgatgtggggctctctgtggtggtggcagatgtctgagatttctcccatgacactgaccaggaaacagatgtgatgggaagctgggccaagtcataaccctcaaggctcacccatagttctggaattcctagtgccagctaaggtcccacaattccccagtatactgacaccagccaaagagcctttgggggtattgcaagccccaagccactgacaacaaccagaagtttatgtcctggacagaacaacctccttaagagatggtttaaatggtgactctggaccaagcttattgtattgtctaaaagctaaaccaaatgccttttaattatgacattaaagaaaagccctttcttcagactaatttgaattatatgacatagtactgttaactgtaatgatgcattgattaaaaatgtaattttgctaaattaaagggaaacaaagctataagcagattctcaggacccatcccatacctagccagtcagtggattgtattttgcagattgacaggtgattcctatgcacattaaacatgagatgtgctggtctatggtccagaaccacggcttgaccctttccgttagttatcctgtgcatctagatatgcccagctaaagtctgtgtcttgacctcatttggataaaaataaagagaacacagaagagaagggtggggagcctccatccccacccccagtcaaggagccaggaaatctgagctgctcccgatgtcccttcacagggacctccgtcgacagctgttctgttgaggaagctcactcagtccatagggaagggggaggggccagttcagctacatctgccagggacgatagatgagaggctgccacatttgccactcatgaagctgtagatgctgagggagaccaattaggaaagagccctgaatcttcctggacagaatttgcaacatggaacataattgctttctcattcctgagcaaaatccctccatgatggaatggcttcatggccagcctccttcatcccaggagaagcaaggagggctctgattctcttgaaagccttctcaccctgagatcttccacttggcctcatgcaccctacggtggccaagaaggattctgctaagcacagcccagagcagccgattgtcacaggcatgctccaccacgggtgaacgccccactgtcataaactgcagaagcagctaattctgcagaatccaactctcctgggaatttgattgacaacatcccccccccaagtcagatacatcttttctttaaagtgcattgctttaaaagaagtttcaaaaacactcgagatcagatgtcttactctgtcccttcctttcaacagtgtggcaagagtgctggccagaggttgggagggcacacgctccaacaggaccctcctgggtagatggatgcctcgggatagtaatgaatctctctgcacctcagctcattggtggctcagtcatcaatacagtttcaaagaagccaaccccattctcctctctaagttttgtgagtttgagtacatatcattgctaatggagaggtctgtctcatcggtgagattttcagggcatctggctgctgtgggagggtgactaatcggtgctaagatcatctctctgtcctggatgatcgcatggtgcagagcaccctggaagcatgagagcaggccagaagtccctggtgtctccaaggatacaaagcccataaataaattgtggtgttgaggcacctaaataggaacagagcaggacatgaatttagctcccggagcacacccagtggcaaagataagctaacaggaaacccttccactgaccatgcctggaccatccccgcctggccacaaaagcacacggatttctttccccactactatctatgccaatagggtcggggtgataaccctggagcccctaattcaccttctgctggaaggggactcattctggtgtcactcacagactaacgcattgaccaagggtgctgtggacagaacagtgtcccctcgactctagatttgtgtgtgaagccctaaactcccacatggcagtatttggagaccttgagagagggctctaaggctaaatgagaccagaaaggaggctgtgacagtgttaaagggtgggcacacaggcagagagcatggggggtatgttgagagaaggctgatctctgtacaccaggagcaaagtcctcagaagaaagtgaattgcccgctctttgtcattagcttccagagcaccgagaaaacgcatttctactgttggaagcaccggtttgaagttttttcttttcttttcttttctttttccccagcagcactagtcaactaacacaggactgctctccaggccacagctgtcacagtcccatggggcagctagtgactagagctgagtcacttctgataggtggggtgggaaagggagagaaagtgaaggtccctgggccatctccagctgccagctcactttgaaggcggagaacagggctagcagatgggagtgagttgagtcccttctgcaggtgagtcacagggtatctgggcacacagcccactgtcagcgcacagccagcttctagcctctgagcgtcacatgagaaccatgtgagcttgggggcagctgctagaggaaggcatgctagactcatggcatctctgttgtctttgccctctgagtctctcccgaggttggctttttatagccatcctcaccatcaaagggtactggccgcaaggcttaccttactcctgctagtcacccatctctgcctctttgggggtgatggtgacttcatacctttcctgtggacactctttgttaaaaggggtcccacatttgtaagacccttagaacccttacctagtatcaaggcttcttgcttatgcacttgggtgaggcttgagacccctgccttgtagcccgaggactcttagatcacacagaaacacagccccttggatcatctgccatgttgttgggtgtgttccgggctgtcctttctccccactgcagaatgcctctgtcaggatgcttgcaccgggaacttattaagtaccaactcttctgggaaccagggaacctgatgcatgctgggcggaagacagcggctgtagtcttccatgggatgccttgggggcactgtgatcccttatccctttctagtccacactccaatgtcctcccagggaagaaaacagggttctttcttcattttctctctctgtctctgtctctctctctctgtctctctctcgctctccattcttctgtctctctcctctcgtttctcatgtgttttctagttgtgggtaaaactgtgacgtcagcaatgatttaccaaagcttatgtctgcacctcctgctgtccctttcctctgcttggctgagcaccacggcggcaggagtctggcctggcttcccagctcccagcatgggacacacacatgcttcgaagcgtgaggagcagtattaacctcttaggagatttccccacagcaaacgagacagtcacagagtgttatttctgtcgcttctcgccttcatctttcaccatttagaaccagccactttcagtgagcagggtgaaacagaaattcgagattcatctgtattatcttctgctagactgtcatgatgggagctgctcgttcgccatcctgaggaactgtgggaatcaagcatatggcagtgaagattttggaaccctagctcctgcatggtcacagggcttggctctttatacctcaggtttcagggagagaaccaacatttcccacacagtccatcactcctggcttctgattcagcgggccacagagcagtgcagctacatgcaaagggcaggaatgggtgcgttccagctcgctggggtttggaccggcagctctcatccccagagaagggaatctctgtggaggctgggctggcagcactcaagcttgccttgtggttggcacgtaggccatcagaaatcgtctgctggggccatcctgagggacagggatttattgctcatggaggaatgagagaagccatttccttctctccactttgcaggctccttttgtgtgcgggactgctattgccccaaccggttcaataccaacttatcatgcctacattcttccccaggagttcaggcctgtctctaccaggaacaggtgccaaattggagtatggaattttcccggcaggcctctgggactgctgctgccaaggcgactgtggtagggttggggaataactatcgaaccacagatctggagaggcaagaccaggccacccttttgggcttgaatcagctcaggtacaggctgtcccttgagaaacggctccccagtgccaaacccagatgaggactgtgagcaaggttggctctcactagacaactcttcagaagtaggccaagcaggccctgtaaggacaaaggagagaggcttttctgggaaggccacagcaggctctgcccagtaggagtagcaaaagccacatgatttctagggaagccccagacacctggattagagggtgtctgaagtgagatccagacctttgtgggtgccaggaagaagcagagctctgttctacacagaagtggtcctaaaattcaggacagcaagacagtgagcgataccctatagccaaggtcaaaagtccatgctggcctcagcagggaaagtgcttgccctgtatgcacaagggcctgagtccagtgtcccagaactcactctggaaaagttgggtgtggtggcacacacatgtaatccctggcatggggaggcagaaagaggtgactgcctggggctcacaatccagccagcctggattaactggtgagttccggccaatgaaagacccattctcaaacagtagtaacaacaaagaagaaccctaaggtgggctgcacccgcattctcctgattctatagtgcatgttcacccatacaaagcagccatcctccccaccttccctcacctctgtttctctccaagccaaatgaggagacacagagaagcaggtattgttctcttctctgaggtgtgggtatgtgcacacgagtgtgtgggttcccgtgccccgtacacccatgaggagtcatcccagaatagggcagggtttgcttttaattgtatcaccttgagatagggcctctcactaaaccagaaactcatatttttgcctatgctggctggtcactggccagcaagctctcagaattgaccgatcaccacctgtccaatgccagtgtgacagacacatggcaatcgcatctaggatttcccaaggccactggacattcgaactcatgtcattatacttgaagagcaagtgctgttacccacagggccaccccctccacagccccaaagaagcaagtcttttggagcctgcctgttagaaacagatcaacactgcatcgctatcggcagagcctgactctgcatccagtggaaggggcctcgcccacagacgacatggcaggcagcacacttggccggctgggagatttgtgactacatggctttcctctttctgggccctgaaatcttgactacagttctaagatcatttccaaggtcattggtgatgaggccatggagggaacatcagtcgtggggacagaaaagtatgctagcccctgctgtggctttgattagtgagggcattacttcatctggagacacgcacgtccactgcttctcttctttcttgtacatctttaaatgggattaaaagtgacttaaagcttgaaatttctcctagggtgaaaaccagagtccttggatctacaggtgtcacagcgttaaaccctctcctgcaggcagatgacaaggtaggtgttccttcctagtcaccctgggaagggttaacagtgacgtgataaccaaccattgcccttttatttattcactgttattatttccctgatggctaaagacgttgatccttgctttccttcacatgtctctcgcctcttctcccaagagctgttggctcacttgtcttcattggtgggactatttggagggttggggtgtgtaacattcggggttctttatatgcctacaattaacctcctgtcagatatatagttagcagagaattgtctgtaattctttaggctgtctcattactcctgagtatttccttttctgtagggaaggttttgaatgtcacacaaccccatgtgctggttctgcgagacttgagtcgctttctgaaagctgggacgtttccctgtgtatccatctgtggtttcagagttcagcatcttccagtgctagagttttgttcagaatgagagaggggggtctactttcccagtgttgtccattgaaggtcctgggctttttgttttggggtttttgtttgtttgtttttgctatccaatgtagttgtgcttttaacttttttgttgttttgagacagggtttcagccagtagctcagagtggtcttgaacttgtaacagaacccagccttttctcaagttctatgatccttgcaactgctttcccagtgctggggtgctttcccagctctggggtgcaggtgagcatggccactcccagctatgattctttccccaaatccaaatccaatttgtcaacactgtctgccaggcagtgggctccaagctcttcttcttttatctcaaatccagcattttggaggaattaagtgacaaaagtctatttggggccgggcgttggtggcacacacctttaatcccagcactggggattggaagttttagagggtccagatgcctggttcatctccctctgcatcttccttttgttctcatcacacattccccatcatgtgtggctctggttgggaggctggggctccatcctaagagacagttctatatatctgatgggaagatctctgctgcacgcagaaatggaaacggagaaattattggtctattgggctgtttgtaaagagcccctgagagcccaggggtcctgcaggaaattgggctgttacaaacacaaaacagaaagggcagaattcgggtctaaagaccctaacagagacccttatggaggagctgtctttagagagtataaaaagctgaaccaaagacatggatgaaaccgaatagactttttttctttttttttccgagacaggctttctctgtggctttggaggctgtcctggaactagctcttgtagaccaggctggtctcgaactcacagagatccacctgcctcttcctccccagtgctgggattaaaggcgtgtgccaccaacgcccggtcccaaatagacttttgtcacttaattcctccaaaatgctggatttgagataaaagaagaagagcttggagcccactgcctggcagacagtgttgacaaactggatttggatttgggcccattggcttcaatgctggaatattggcttcacggccacacatgttccccactttacacgtgtaagaaacatgtattcaacagaggctatactttcgactataaacagtgggggggggcagaatcttcaggatgtggcaggtagagacccagaaagaaaccagcaaaccagaaaagctgttagcatttgctgtcctgggccagtgctctgggcacatatctttgaagcctcagtactcagttgctgcttccagaagttgttaaccttgcagtggtaggacctcatggggtatagcccagcaccacttccagccccattcttcacttcctgattcttgagataggagcagatggttgcaagctccactggccagagagtaatagttgtaagtaatggttggacctgcaggcaaccatgaggagttgtcttaggattctctcactgaaacactatggtccaaaagcaacctggggggaaagggtttgtttcagctcacaattttcactgagggaagtcaagacaggaactcaaggcaggaacctggaagcaggaactgaagcagaggccctggaggagtgcggtttgctggcttgctcctacggctttctcagcctgcttttgtatacagtccataaccacctgcaagggtagtgctgcccattgtgacccgagttcttgcacattagtcaataaccaaaaggatactccccagacctacctacaggcccatcagatggaggcatttttctcagtgaaggttccctcttcccaggtatggctaggtttgtgtcaattgacaaaaacaaaacaaaaaacaataacaacacaaaacaaccaacacaggaggatttccaacagagcaatgacttgcgtttaagttgtgtttggaaagagcattatgctgcgttgttttgggcagactatgcaagtggatcaataaagcgggaacaccggtagggcagtctgctgactgtggtcacaggactaggatggcaggagtgttcaggaagaggagtggaaaattctggaacacacctcctcactttgttcacatgccttaggtgtcactccatctacccctttaactgtcatcttctcagagacctttcctggtctccaagcatgcacgttgatgagctggctgatggagagacttgctagttgtcagtaacagtttgtctgaagaacgcagggctggtcattcctagcaaatccccatctaactcatcaaatcatcaaaaaagcaaataacaagcaaacagatgtcccaacggaggtcagtgggccactgcacactgccacagtcagcagacagcctgggacctctgattacagcacttatgctaagcaactatctctttcagaccatattaaatgaccccagtgacatgctatgtggccattgccatgcaaatacagtttctccttctgttgattggggcctggaacagctctaattcacatgaggcagatgaccaagggcattgattgtataggtctagtgccacattgtcatgcctcctgacaagacaagagtgagggacaggagagttcaggattttctggggaatggcaccttgattcacacaatcaatggcatcgtgttgcttgaacaggctgcagcagatcaccgttactgtcagtttgactgggtttggcttcacataggagatacacctctgggcatgcctgtgaggtgttccagggggccttatttgaggagcagagacccaccctgaatgtgcggcagctttccctgagagagggagccaaggagaagtttgtcagagctatgtgatctggagcatgccacaatccacattgcagtaaaagacacacacctttgcatttcgcatatcccacccaggaaagcagcacacggccttcgagacagcccagcaggaaaaggtgcacgctaggcaaacccggagacctgagcttggttcctggaaccaaggtaaaggagaataccaactttacacagcatgtgtgtaccataatacacaccatgggcatacaggcgtgagggcacgcatgttcgctcacactccagtaacagtaaatgaaaataaggataaaaaagtgaaagtagtattaacaactagtttctcaggaagcacatttcgcccacactggagaattctggtgtaaccaatttagtggctattatggggcttttagctctaagaagggctcagagcaaggaagggctatctatgtaccaggacacaggcttcccttctgttcagacagtatgactcagaagactctttgacatgagagacagctctgataagaagagatgtcagtagctatttgaatagtcagatggtcacagaagaaccccctgccacatgcagcagagacacgcacacaccattcaaacaccagtgctgtgaaccccgctggactgagcggggagatggaacaggagtgatccagtggccaaagctggttttctaagcccagggtccaggcagaatgactcaacaaaacacacagtctgttgatctagtcacacactgctgtgagatggaagccctaaaggaaggctggaggcacacaagaaagtcacagagctggtgactggggccctcacgtcgccactgctgtctggctgtgccctgcccctctgttgtctgtgcctctgactacttgagagtcccttaggatgcagtgacagagaccaagaatggggccgagtgtcatcaaaatggagctggcccagtatatgacaaaagccaaaagtagatggctgccgcataactctgagggcaccccaccccacacaaaccccaacaagagaattcagtcatgaggctgggagatggcttggtgtgcaaagcacctactgtgttagtgtggggcccaagttggaagagtttgaatccccagaacccacacaaagccaagcatggaagctcatgcccattatcacagggttcctagggtgggatggaaggtagaaacagcagaacttccagaagccaaggcccacaagcttggggtacacagcagctgataaagagaccctgttccaaacaaggtggaaggcaaggacaaacacccaggttgccctctcacctctacacacatgtggtggcgtgtacacacctgcatttgcatacacacaacaaccttgaacccagtacgcactgaaatactttcaacgggcagaactttggggagggtggaggctgaccctggacaaccatttcatggagagaaggaagcagtgtgttataagaacatatgggcttaaggacagtgaaaaatggtgtggctctttggtcatgggcctgggtaaaagaaagagtggacttctgggaaagaaacgcaggacttcacggaactgaacacaaggtgtgaaaatgttcatacccatgttcttacctaccagacagcataaacaacataagtacccagaatgccttagctggttggcattagcacacttctgtgtggtcagaccaatgttggcacaatgaacatatatgtgtaaaacttaagcatttatgcagtgtgacagagactactcatgacctcactagcatgggctaccactcaccaagtgtgatttatatcttcccgaagcttaatgtccaatctaccagccacaggcaccaatgtcaagaccctaatataaccctacctcacaaggtcagctatgtgatagaaagctaccaacactgggtcccttccccctgaaaggattcttggaggaaggtatgtctttattccctgcagggccttgacctgcaccactatgtaaagattcatggtgttttaggatcttgtaaaacgatgtgttgggccaggaaactcaaatgacctcgttttgagaacctagaagtgcaagtcttaggttctactccagatatgctgaatggaactttgaggcagacccaaacagtactgtttcaggtgatcctagaggacactagtgttaggggaatcacttgcttaacacggaaggagatgctgcacgtagtgggcacatgggcagggtgtcacacagtgtgccagcaagaagcaccagcctgtcagtgatggagtggtgttttatgggagtgacactacccagcacagacaggagactgtcctgtaggatacagagcacaactgctctcagtcaggagtccaggagagatttaagccatacagagagtgtttggggtgactatgacctccatcctcccaagactgaccgatagcttgactccaagggggatagatactaagatcactactacagtggataccttaaactttcatttcctcagagagacctccttggcaatggctgccatcggtcagtgagcactgaggaataaatgggtttgggcagccaggggtgggcatgccggggaccttgataaccaggacttcccatgactcacttgggaaagatgtgtttctagtcctacagcttggggctctgggaggctgggttccagcaaagaggagtaaaaccagtgagaaacattctgtctggagagaaatgtaagaggatgaaagaaagtttagagtgatgactatgtaaccaacaccaggagcaacacaggtatccaaacccagtaggatggacattctagacaagtgaaaaccccatttcagtcagtggaaagccaactcctggagcgacgagctgttggtaacaggcagtgccgtgagcccttctgtggtcctcgttttaaggcatgtctactcaccatccttctgcattctcccacaacagactgtagcatggaagacaggagaatcaggaccctagtgggctggagaggaagatgaggaagacagagaggactgggggtcgagatgcttgggaattgtttcagggatggaacttgacctgaggagtggaggggcaagatggaggaggaggctgggtagtgcagactttaaaaacacacacacactaaacgtgtagaagaagatgcaacatgctcagaaactacgcatctgtgcagaaatgtgaacagcacaggcacatgtctgagaggttttaagaagcacgtgagaggccaaaaggcagaatggattctttgctgacctaaatctcaagcaagctagaagctcagtccaaccaggagggcatccacggggagtcccatttggctaaaagtagagcagccgacaaattcttgtcttaccctagcgacagaatcatcaatcagtgcaggggagatggaggggtttctgctttcagtgggaagaaaatctttgtggaagtgaaattggtgggaattgagagagaaaattgcttgattcccttaactgccctaaatgagttgcattttctgtggttcatgagatctgaacccattattagtggattttgtgaagttttgaaaaataaaattggcaatagacaaaaggacttcacaaaggaaggtagagtttatgctggaatgaaagactcccagagaacaggactagcagatgaaaagacaagaaattagtcaaccagctatgtttctggaagcagaggtgagaagtccgcagaggaaagtgtattatcaatctaatatggcccctcggagctcttccacagcagcctggccccaaaccaacttttaagcagtgtatttcactcacatgagtatttatactctatttctagttactagagcttttacattaacctgatggtttttattagttaatttccttattgatatcatggacaagaagcaaccccgggtgggtggccttattcaggctcataatttgagggatcatgacaacatgaagtggctagtcacactgcatccacagtaagggagcagagagagagatcctgaggcttccctgggtttctcctccctgatctttgcccaatcccgatccatgggatgcaaatgttccatctcagtggaccctctctgaaaacactcagagaaatgttcaaatggcttatatgtttcacagtccaatcgaggtgacaattgaaagttgccatcatgcagctgaagaaacaggttaggcaaagtcattggcttgctcaaagccacatagacaaagccacacagaattgaatcaaaatcaaccccagtcagtatgcctctctgaaaagcatttggtaacattactagcttttgaaaaccgcttaaacacaagtgcgtacacgtatgtgttcatgtgtgtgcacctgcatgcgtgtgtgtgtgtgtgtgtgtgtgtgcgcgcacacgcgcacttgtatgtgtgtgtgcatgcaagcatgaagattggcgttactggatgagctatctccttagacctgtatatttaatttggagaaacggtggcattcttgccttcattagataaagtcactgtgtcttcaaatctccgtctgtataagaagacgctgtcccccagacgccaccaatcataggcccccctgacttgtaatttctgctgaagaacttgatgtttcctttgttcgttggcctgtgagcctgtgattttgtgggatttgagcacgatgtcatgttgcttatttatttactcatctttctaccaggctgtctgaaactttgattctgattggtctttctgacctcacccacagtcccctggggctggcttgatcacgtggtgctctggcactgctgtctgggtctttcttttctttcctgagtctctgacagaggcagaaaagcactcaggaaagtagtgggctcccttgctgagaaatgtgaacacagtgttcatgcaagacaagagacaagagccaggtcatgtgacaaaccacatggcagcgaatcttcagaagagatgagaacacgccaagactagagtcctgaatgtgaaactagaaagacaagatggaaatgcaggcaggtcgagaagaagggtcagaggtgagaggtcagagcggtctgttcatttcaaatagccattgatgttcaaaacctctgccctgccgtgtgtgtgtgtgtgtgtgtgtgtgtgtgtgtgtgtgtgtgtgtgtgtgtgagtgtgtgtgtgtcttttgtgtctacctctctgtgtgtttatttgcacgtgtctttttgtatgtgtatgtttgtttgtctgtctctgtgtatgtctgtgtgtgtgtacctatatgtctgtttctctttgtgtttgtgtctctatttgtgtgtacgagagagagagagagatcaggttgcaagagaattatttttgtagtgaatggatatgtctctaatactcagatactcagacaaggacagataattttcttgtttagaattctttattgtatggcccttgcaatgcctcagcagctaaaggcattctccacatgagcctggtcacctgactttcatacctggaacccacataaaagaataatagaactgactccacagagatgccctttggcctccacatgtgtgtcatgccatgtgcacccacccataaataacatataaataataatcaataaataacattaactaaaaaagttaaccttaaaaacaataaatcaaactgaaaacaacaactaacaccccaaccttctcagggtatcttattgcctaagtaggaaccacccaggtgttttaatgtgattccaggtcctctgttctacgctctgacctctgaccttccctccacagctttgcattctctatgcgactattgctttccaaactcccgccatatctggcttttgcttggaatgcttttctctgttctctgtgaccgtgcggattttcatccttgagtctccagagctgtcctgaccactcttgcctcatgtgaacccttcccattttgaactctcacagtaattattatctgcccacgtatttggcagatggtcatcgtctccttgagagtctactggaaaccaatcctccacccagctggcttatgcaatgaggaaatttattatctcatgtagcaggaagtcctgagtcagggcaggctccagcaaagatctggggacttgaaaaactccttggaaagccatgtttacccagttgtcatccagcatctgctttctcatggtcctaaggtgaccaccaaaagccagtttcccctttgtctgtctgtacctagcagccagagactgagaattcaggccccaggcagtgagcactggaccataacagtgacaaaggggacccacagtgctcctgtggagagggccttccctttctctttcacccaacaggagagctggggtctggtaggcatcacgagggaggagatgagtgttgcagggtcatatgttgccctgaaatagttatctgttatcttacctagctgtttgtcatcctctccatttcttttcccttcgggtcagttgcaaaaccttgtatggtgcttacattttgtaagtgacatgtgattttcttatagttatgtcaggaactgatcattggatggatttggtgtttataaggttcagtgacattctttatgcgcatgcatgtgtgtatgctcgtgtgtgtgtgtgtgtgtgtgtgtgtgtgtgtgtgtgtgtgtgtgtaagtgtgtgcatgtatgtatatgtgcaggtgcacatgtgtgaacatacttgtgcaggtcaaaagtcaatttcaggtgttgttccttaagcaccatccacgtgtttttttatttttatttatttatttttaaatttttgcaacagggtctctccctggctttgaactctgtgggtaggtgaggctacctgacgagtgaaccccaggaatcccctgtgtccacctctttagtgcttgtattacaaaccaacaccaccatgtccatttgggttctgttttgaatgggttcttgggtttgagctcaggtcctcatgcttggcaagcgctcctccaacttagccttctccccaggcctccatgaccaggactacaaagtgcacttaaggcttttgaggttcagggattaacttaaaaagatgaaaccccaggaagtcaaagatctggaacctgagaccacatgctccttgatcctgggtttactcagctccgggaactacacagtattagcatcacatgccagtcagacgcccaaggtcaaggaggcggagattctgtcctatgctgcttccaccctcgagacttgaatatgtctccttgctcaaacctgtatccattatactatgttcctcccagggaaggtgatcatagtacacaaaattagtgcttaagatactcattcacacctgggattagtagctcacgtctgtaatagtaacacttggaaggcagaggcagaaggattgggagttcaaggtcaccctcaactacatagctagttcagagtcagtctgggctatgtaagatcctgtttcaaaacaaacaaaaccaagcaagatattcattcattcattcattcattcattcattcattcattcatcaacaaacttctgtcttgaatgcctatcaccaaactgtgctagggagtaaatacatagtgaataagaaatgattcttcaggctggagagatggctcagaggttaagagcactaactgctcttccagaggtcctgagttcaattcccagcaaccacatggtggcttacagccatctataatgatatctggtgccctcttccagcctgcaggcatacatgcaggcagaacattgtatacataataaataaataaataaataaatactttaaataaaaaaaagaatgattcttgcacccaagttgcccaccgatggacatgcagtaacttcctcttctttagtaataacctgtctctgtgaggttgtggggacagacgcctcactgtcgtctgccttgaacttggtgcttttgtgtagacatcgagctgatctgggtgatcggaaggggcagtctgtacccactgtgttcagtgcttgccctcaggtggcactgagctcaactgaaaaatctctaagataggattcatactagtggtgtgctgtgcacactgtgaaagccgtcccctacatgtaaggctccttctgacagctgtggctgggaaatgtcatctgctaaagcatagtaaaatgagctgaggtagtggttaaaagtttctgaatgagtcaggcctctggtgctaaatttattaatgaatcatgttcctcgcctagcagacactgtggcagaaagtgaaagaggaagaggcccttctatgtctgtttttaacaatgtgttctgaccctccatctgccggggcaaattccaacatgtcttagcaatttaaaacaatacttgtcactgaaacatggacccgtctcccagccttcagaagagtaaatgaggtcttttctctaagaatagagtctaattttcatcttcgcccacaggtttcagagtctaaattcctactgaccaagctgtggcctctggtgccttggtttttgtagaacttcaagtctcatctctataggagtcaccaaaaccttcttggacagtagtcatctccacttgtttcttgccttacacttttattccagccttcattgttattctgtgttggcttcccattccatagctctgttctggctctctttataggccatttcctgggagagatctcaactgggccctttcctagtcatcctgcgacttcctcttccgctgaggcttctgcacatgaataagaattgcaagttcctccacctttataccgtcttaaattgcatcattcctcttagcagctgctcactggaactgtgtggggtccttggtcagccgtgacatcaccgccccaccatccttgatgtttctgctctcctgtcaaccccaaaaccnnnnnnnnnnnnnnnnnnnnnnnnnnnnnnnnnnnnnnnnnnnnnnnnnnnnnnnnnnaggataaagactcaaagtttgatggcattggctttctacaaatttaccctgatctgcagggtggtatggagattgtcacgcctgcaaacatttctcctggatggcatttctaaatactccatatcccttaaaactctatccatacaatacatgggctttggaaattcatttgtcttcttgattcatacaaaatattaaggctaatctaaactgccttctcccccctcttcctttttcccttcctctgtacgtgtgcttttagctattcatataccttggcatatctatcatctatctgtctatctatcatctatctgtctatcatctatctattatttattatgtatctatcatatatctctttatcatccagctataaatcatgtatttatctattatctatcatctatgtataatttatctgtctaccatgccacttagtatatgtatatagctgtaatctgtccacctattatgtatacatcatgtatctatcttatctacctacaacctatctattatcaatatctatctatctatctatctgtcatctgtctatcatctacttacctatcatcatcctaccatctatttgccatatatctttcatctatctatatatctatcatgtagctatcaatcatctatctatcatctaactagctacctagctagctgtcatctgtcaatctatcatctaccaattaatttatcaacctaactctaatctatattgaagtgaaatagaatgtttgtttaactatgtaaagatgtgttgttgtttcaccatgcctgccaaaggcacatgattggtctaataaaaagttgaatggccaatagctaggcagtggagggataggcagggctggcaggcagagagaataagtaggaggaagaatccaggcttgggagagaagagaataaggaagaaaaagagaagacacccaggggccagccagccagacacagaggaagcaggaaagaagaacatacagaatgaaagagaggtaaaaatccccgaggcaaaatgtagaagaagataaataggttaaattaagttataaaagctagcaagaaacaagcataaaataaggccaggcattcataattaataaatcttcatgtcatgattcgggggctggtggtccaagaaagccagccatactgaatatctctcatctaccaatcatctatttataacctatcatctgtctatcatgtatctatcatatctctagctacctagcatgtatgtatcatgcatctgtctacaatctatcttgctgttgtgtatctatcatctgtctatcatctacctatctatctactatctacctatctatctaccatctatctatctactatctatcatctatctatctatctatctatctatctatctatctgtctattatctatctatctactatctatcatgtatctatttactacctatcatctatctgtctatctgtctattatctacctatctgctatctatcatgtatctgtcatctatctatctaacatctatctatttattgtctatctctatctatctaccatctatcatctatttactatcacctatctatctatctatctatttactatcatctatctatctaacatctatctattttctatcatctatctatctatcatctatctatctatttactatctatctactatctacttactatttactatctatcatctatctatcatctatctatctactatctatctgtctatttactatctatcatctatctgtctatttactatctatcatctatctatctatttactatcatctatctatctaacatctatctatttactatctatctatctatctatctatttactatctatttactatctatctatctatctacttactatttactatctatcatctatctatcatctatctatctactatctatctatctatttactatctatcatctatcatctatctatctactatctatctatcatctatctatctatttactatctatctactatctatctatcatctatctatctatttactatctatctactatctatctatctactatctatctatttactatctatctatctatctatctactatctatctatctatttactatctatcatctatctatctatttactatctatcatctatctatctatcatctatctatctatctatctatctactatctgtctatttactatctatctactatctatctactatctgtctatttactatctatcatctatctatctatctatctatctactatctgtctatttactatctatcatctatctatctatctatctatctatctatttactatctatcatctatctctccatacttgtgtccattcatcttgctatcatttgtcatgatgcatctatcaagcttcagttgaagagatgattggacgcccagttgtggacagtgtgatcagccaacagctcccagatttcatcttattccttcgatgtagagggttatcttgcctgcatcttacaagagtgcctatgtccatgactgaaggaggaacttctagaatcctgagcttcaggcagctgcaaggtgactgccagcactcttgacctcccgacccccatcagctttctttgtctaactcaagtcttcatccatctttagaggagcctccttgataatgaatagaacatatcacaaatttgtcttagtgtctccttccagagacacccaccttggagcgtttgcacaagatggtagaagcctgtttcaccactggctggaaagggagatgacagatagatggcccctagcagaggacactagttttgtggttagacattcaccagtaggaacagacggcaaggtgtgctggtggaaggtgctgggttggagggcgtgctgcatccagccactgaggcacacagagggaatcatagctctctaggcaatagcagtctgacatttaacaactcctgctgacggtcattcacgtgctctgtgggaaggcgacagacagctgggaggacagtggaaaggtgaatctcacagccagagggttccttgtttgtacacagtctcatctgcaagtaaggaaaggttctcagtccaggtcatctgagtgacgtcaaagacggctaactgctcaggacatgcagacctcttatggtcttggttggggacacctggggcccaaacaattaggatgcagatattttgatctgtgtacttgcagtattataactctcttgttaatttacctatctaattttctcccggcattactaattattgcctctttctcatctgtcccttccctcccaatcaacctaggaaaaactgcccacaaggagaaaactgctctcactgtgagttcaggagggtctttccatggctgtcgaggattattgactccacagggtccgtactttcccctttgctatgagttcccagggaggtgtatcccagcctgtctgctctgcttgacctcttctcctcagcccttcagctgctgtttcctcacctgctgtactgccattccatgtgactttactgcaaagcgagtacacagctgcttcatgggttgttgcatgaatctgaaatggcctgcaagctcatgcttcagacacttggtcccccaccgtggtacactttggggatgtcctggcaactttagcaggtgggatataactgaaagtcacaggggtatattatctctgcccccccattccctaatttgtcagctgagttggtccacaggtcttccctcccacaatggcctaagccttgtgatacccaggaacccaaaatagtctctccttttgttagtgtgtccctcactgcgacgcaaaggtgacgggtacatgcgtatgtttctcctctgacatcctaaagttggacccatcaaatgaagcccctgttaatctcatccccacagcactctggagaagagttcacctactcaccaagccacagtccctcagacccaatggtacaagatctgcagcaggccatttccaagttggaggcccagctagctcagttggtagagcatgagactcttaatctcagggtcgtgggttcatgacccacgttgtgcaccatttgtaaagataactctttttgccagccacctgagttctgcccaccacagattgatctgtaaagaactgacagccttgtgcctcttgctacttgacagcattcttggggaggagggggtccaggctgtgagtttgtgctgcaaagactttcaattttacagtgtgtttgcggactggtcaagtgaatgtgaataactagtagtgtaaagataggcctctctcacctgtaattaagtcagccatagaaagacaggctgggatgctttgataagaggagagagtcggggtcacatgacaagcaatgttcagctcagcagagtaatcattgctgaaattctgtgttaggtatctatcctttcccccccaattcctcacagctagatgtacttctctatcccgaggctgcgggaaatacattaaaaatattatactactacttttaagtttaagaacattcaggctagctggagatgtcagagtctggtgtagggttcggtgtgacgtttaccactttctaccagaaaaagcgactcatgagtgctttatctccacagcaacagccttggacaagcactaaactgagacatagagacccccaaaccttgagtttttttcccttctcaggcttcagtctttccccttgacatcgtctaactgctgagtggtgaagctgggaactcattctgtgacagccccagcaccaattcccctgttctgttcacagattttataagctgccttcctgcctgcctgcctgtctgtctgtctgtctgtctgtctgtctctttcctaattcagggtcttaagtagccaggctgtcctgaaactcactgagtggttgagaaggaccttgaacttctgttcctccttccttcatttccctagtgcagggattacaggcatgagacaccacacccagataatttgagagagagagagagagagagagagagagagagagagagagactaccccaggctcttctggaatgtatgtagaccaacttgacctacaactcacagtggtcctcttatgtcaccctcccaagggctgggatggtaggtatgagccactacactaggctgtccatttttccccagggactctggaaacactcagggtctgtaccaatcactttggcccctagtccctacttgatgcccacagggctctctcactgaagagagtaggcactggtttcagaaatatctacagtattcagcagaatgccagagtgctgttgtgacttgaaaaatctgttgaaacaataaatgattttagacatgggccaaaggtgaggaaggtgtcaactctgtggctggcaccaagcttcctgctcatcagcatctctcagttcatactctccctcgggtcatgcggcccacacgacccacccttgctccccagtgtgaaacctacacaagaggtcaagtcccacccagaagctacagaacactttggggaatgccatctgcctttgctagttccttctttctttggtataaccttcctatgctaaaaaaatgacccctctggcacatttctattgccatccttgttaaatatcaagaaagactaaaactgatcatgaattaggcaccagtggactgtggtccacttaatataatactctggtttaaatagctgccttctcaaaaataaaatagacagtaaattgaaaccttggccatccaaagcagactttctggttattataatcactagctctctctctctctctctctctctctctctctctctctctctctctctcacacacacacacacacacacacacacacacacacacacacactggaaacatttaatgaagggccttacattatctacccagggtaaataatcactagattacaataaccagaaagattagcatctaggcttgaaaaggaaatagcaaataacatccccccaacccattcaagcccaggcatccagcaccaagggttcagggtgccaatgacagtggattagacgtccctccattatctatcttcatctgtctgtgcatttgcaaagccatgcgaacaactatgcttttcatttttccaacaatgaattcaaggacctatcttttgaaaccaagactcaattatgcttccaagtaatagcaacaaaattatttactctttcaaaaccttgtcaacctacagcctgactgtgtgtgggaagcaccctgcagcaaattgagggcccagtttcattctgtcaagaagtcagcaggtaagagaaaaatattagtagagacttccagaatatccacacatccaaaatccagactgtatgtgcagaacaacagatattcagcatgtgggctgaattcccaccatagaggtgtggttattgagtcctccaacacttcactgaacccagagccattgccttaggaatagctattttagctgggtatggtagcacacacttgggggtctgtggcaagaggattgctgtgagtttaaagccatcccaggctataccatggtagttctagaccagcctgggctacgtgtttcctatcttgaacagacaaaaacaaaacaaaccaatcaactgttttgtagttagggcttatgtttgtctttgttctctgctctttgctgtttatgacatgaaaacaactgtaaactcaaagctatttagagccttaacaacaaatagacacctatgtgacccatcttgcacacaaatactaattttattcactgtaaaacaaaaatgtataaattaaattttgtgaaattaaaagcattttcttttcaaagacgaaaaccaaaagcagtgatactagggacaaactgaaaacacaatatatcatcatttcctgagtgtgaaaaaaaaatcaaagctcagccatgagccacaagccacaaataaaagcaaaatgcacacaactgctcatacaaggagagctgtgcatgggcactaagatgttcaacctagttattccaggggaaaatggaagctaaagctgcaacaatgtctcctacacactagaattgtgacaaatgaaaggactagaaattcttcttttggtgagactgtggaataaatggccctcttgtcagtcgaagatcaaaatggtacagcaactttggaaatcagttggcagattcttagatattaaatcacctcatagaaccagaaaaaaaggcaatgaagcccagaattagcagatggaaagaaatggcaaacatgaaaacagaaataagcacagagaacagaaaacagaaaagaaatgaaattgagttgatgtgggttcagttcttagcacctgtactgtggctcacaaccatccataaggagttctagggaataagatgccctcttctgaccttcttgggcaccaacaacacacgtggtctgcaaacacaaatgcacacaaacatgtaaaataaaaaatctatacattttaaagattacaaatgattttatgagtatgtatgttgctctcagaagccagaagatggcatgagctgccctgtggctggagttacagcatttgtgagcttcctaacatgggtgcagggaaccatacccaggtctttggtgagagtatcaagtactgacttgtgaaccatctctctggcccagccaatgaattcttcataaatgataaaccagcttattaataactgatgagctaagaaaaaatgaaagaggaaatagtcaatgatgccatagaaatagcatgggtgatataaatactgtgaccagtacactgcagattgaaaaactcagaatgcatcaattcctggagacatagcctacgcagaccactgcatgaagaactggagatgcccagcatgcctcttgccagtcaaaccctcaccagacaccgcccaacaaatgaaagcctcattgctgaattctaccacacacttgaactactgtgacaatacttctcaaagtcttccctaagaatggacgagaagggaatgcttccagactccttttgtaagatcagcattatcctgatatccatactgcatgaagatgacataagaaagaagaccgaaggctaatattcttaaatcctcttgtatactgtgactacagaacgccccccccccccatgcaaggatgggtcaatacatgtatttacagcctggtttcttgccctgccctaatctccctccattcacgtctaaattcttccaacccaagagtttatctttgtccccaaagttctccctcgggaacacgtgagtccagatgtccctttctccttcccagtgtctcttattcatcacatcctctgaagactcctcagtcctctcactgatgacaggatgggtcacgagtcactcaccatgtctgacagtgatatctgtacactgctctcaagtccactgacctgcagtgtgtcccaggacaaatggctgccatctttgctttcctctgagtccagcgaaactgttgaggtccttgcagaagcccagtgcaatgccatccctctcccatcccagtgccacccgcaatcaaattccctttacatccttcagctaaaaccaaaagttttctcttaaaataaacactgaacagaattcctggctcccaaactccaggaagttttgccacactgtgtgtgtttcacaggcaactgaaagctggcattctgcacatacgccccgtcccctagggtgacaatgtggcttagtttgtagctcatctgtgaatgcctgacagagatataactaacattgcccttctagggagagactcaggagtcacctctgttctgagaggccagatgggtgcccttctacttcctcttgagtatgtgaagtccccttgtgccctgcggggacactgggaaagatttatgggtttcagtcagtcactgtgcaggaggcgtggaggagttcacagcccagagcacgcacaaggcagaggcttctcactaaccctgtggtagaccaggaatagagagcaaggctggatacagccagcctacaactttcaaaggcttgacgctggtgctctccttcctccaataagacttcacttctccaagttctcacgtgctccccaaatagcgccaccaactggggaatcaagtgttcagacacacgtacctgtgagggcatttcacatccaaaccataataaaagcacaaagtccttgaagaactttgacccagagagtgtctgaggacctcaaagctatggaaacacagccacattgggattagctacccttgatcccatgccggtctcctcatattggtgggtcacgtgattcacctcattatgaagtgaacaagaagccctaaggggtggtcagtcttcattctccagaactgtttacagtggtcagggcattctgagtgacaatgagtcacatccaccaaaactcgttcaccggctcagctgggagtcctgtctctgggtctcggagttctagacggacacctggacgtgtgcaccccaaagtttctctgcaaactctgcctttcaggaagctcttggagcgcacagggtttgagcacaagtcgctctctaaatggttccaacagggaaaaagaaggcagagcactgagtggtacggttagcagagtcacaaggttaaaccacgtgtcgcaaatcctccgcatccacacgctcaaatgtaatcagcctcttctaattacggggaatattgggcctcagggaagtgagtgctcttggccttgtgatcccagcgaggttcaggagcccagtgggtttggctgagtcaccaccgactacaagaccccacacatcacctgaccaccacatgctccagctagcccagctgtagaagtgagtaaacacagcccggaaggacctggggtgcaagtgctgacctcggctcatgctgcgcgtggagtttctgggggcacagatcagctctaccagcgcggctgagggatcctaggacaggccgccgagcagtcttaactctaaaccacctttggaaaagagccagcttcacattctttgggttgcagtacagcttgggaaaatttaaagtcttaaaaatgtcagtatagcttgatcacatgatttcatttgtatgatttttttctccttgggaaaccatcagtggcacactgatgtttacatgcagtcatgctcacccgggtgacctcgatagtgagcactgaggtggtctaagtggtacatgggtggccgttattctccagaccatggcacgtatatatgttaagatgctgtgtggccttgagggaaaacaaaatggcaaaggacagatttgatgacctgggattttgcccggtagaatagtaagtaggaaaaagtattcaaaatttgttagcatgatccagctcatttaaaactattttctcccacacatatagatgaaaaaacgggaggagacaaaatgtgcagtaaacaggtgcttaatctctgggttttcagttcctaagtttttttccagtttcttacaaagaacctgtgttgttttttttccccctagaaattaattttgcaaggcccacagtgtctgtgcttggcctgcctgctgtagactggccagcctgcagcacacctacagagcccggggacacagtggcacatctgtgaactgaagcctgagcaactccaggcctggaggctgtcccgcatgagaatggagaggggttttttaattttatttttttgaggaggaggctgagcctgaagaatggtgcctctgtgggtggcttcttagattctcctttgcacgtggcctccagcctgactcctgtaattctggctggctgacagcaagcttgccaaaacagccggctccccggcatctgatgatggctccgtggcatccgggtagtctatgaagcaatacctgattcggaaggaatgcagagccagagatggtttgaacctgtgttccacgtggttgaacgtttgattctccaccaggtggcgctatttggggaggctctggacccttgagaagatagagtggagtgggagcgggaggaagtgggtcatttagagtaggcctttgaaggtcagcctgggtgccagtccagtccagtcctgtactttctggtctatcgagatgatttgtgctgagcctcaaccgcatacctacactgtgaactcctctgtgtctgaccaaagggtgagaaaagcttactggggactgtgccggttaacattactgtcaacttgacccagcctagagtcatcttcaagaggaacagcctagatcagattggcctgcaagcatgtctgttcgacagtgttggcccctacttgctgcaggcgggggcccaacccagtgggccacagcattccctgggcaggtggtcctagtttggataagaaagccagctaaaagtgagtctgcaaaagagccagcaagaagccttcctccaaggtttctgctccaagttccttctggagttcctgccctgagttctctggactgtgatggttaaggtaaagtaactccctccattccttgggttgtttttgcagtgtttttttatcatagcaacaggaaggagaccaagacaacagggaaacccctctttctatagcagacctcttggagatgaaagcagtccctgtcatgccctccccaaggctccatcctggaaagaaaacgggttgtttgtgagaggaagaaaactcagctcacaccaatagtggctttatgactgaagggaccagccctctgttttagcagccatgacaggctaacatgtgcatcatccaagcctgggagcacaccaatcctgagactgtgcgtacccctagacactccccttacgctgccctataagacccctacctggtggtttcttgggggtctttctccagccatcctgcacggtggatggatgaagggcctgagctaatggggttaggtcattaaacagcagcaataaaggactctctgcttttgcgtcaaaatgggcctcttggtgatgttggggttcagaatttgggcaaacatgatgatatctttcaaagagagcacagccactcccaaggggcagagacagctgatctcaaccttcccgtctgcttagagatgtagcatgctgttggtgcctggtgcctggtgcctggtgcctggtgcctgctccctgctccctgctccctgctcccgctgagtagaagatgctgaaggtggcccagagcccctcatcagccggaaggccggcttggggaacagtctggagtatttttaactcttagagaataagatgcaatgtggaagcggggtgatagctcccattcacagaagagaaatcactccatcatcggttttcttgaatatcgacttcatatctggtactctgttggggtgcagaggaaacttcagagacttgaacagcccttgccctcgaaaccttgatgttctgttgggaatgagaaagtttggaatgtgctgggtgacattccagttgctgtgaagggaaccccagctgcgtaaaggcagagaatgagatgtttgatgtggagcagcaaggggctcttcctctgctgaagggttgtgagtgaggagccacggaatcctttgtgggtgtctgaagtaggggaaagaaccaatacataagacccagaggagtcaccaaggtgacgacttagctggaggccaccgtgaggacttggcctttgtcctatataacttgagaggccactggaggttctcgggggttggggtgcggtggggtaagtgctggggttgggattacttgtgtgttggggacgggcaagaccatggatagaaactggtgatcaattaggatgtgactgccatggcagttgtggctggggggggggtggnnnnnnnnnnnnnnnnnnnnnnnnnnnnnntttcaggggccagccacaacagggccagctggtgtattggctgtgggatgcgacggcaaatggcaccttccaggttgtaggcctaagcaactggaagactcaagttattctctgagatgagtaagaattgggtagaggccatcacggtgtggttttggatttgcagttggttttcactgccgctgtgcttatgttttacaaagtcatctagaaaactgacttagtgaaaggggaaccgatcgatgcacagggtgaagttcccacaaactctggtcagggttttttgtttttttttttttctcttgtcagattatcagccgcttattgtatgtgtgtttctgtttaaaggccctttgtttagtatgtattgttggtttaacaacactgcagctcatgcctgaaggaagtgtgcctaatgtatgtattttctttgtcaggcaaatctttgctttctggaacttagggaaatgaaatagcacttcagtccaacgtctagggagcattttataaagcaaacccaccaaccaacagcagaaaaatggagcattaactccaagtgaaataagtgtgagaggagacctccatgacagctagctgaagcattaagacagaacaccgccccattgaaccacagcttggacatgcaggtcaagtggcatctccgtgcatgtctgaaaacgattatgagagtgtcatgggtattgatttggggtcacaaatgcattttagtgagtaggcaagtttgcaaacatggaatgcatgaataatggggaattgctgaattcagatgggagagccgttgaactgtgcggagatatgaaaaaggaaagtcgtccaggggacttctggaggctttgatttggggattatggccctgtaccttgatctctgtgtatagctagctggagaggaggtgaagtcttaggagttcaaaataaaaaataataataataaaatttgaaaaaaaaaaagggaggagttctggagatgcactttgggatgttccagaaaaggagagagacagagcaaacggtgggagcgagaaatggatcaagagatggttgattcaagaatgaagggcgcgccccccccaaaaaaaaaaaacgaacaaaaaaagaatgaagggcttgagtaggtcaagtgttgtagaatctagtctaatggtaggtcagaatccacctttcgatgaggtaacatgggcttggttgtgattttaagtttcatttgggaccatagaattcaaggtctgagtagagctatgaaagtacaaatacaaactttccagagtttggatgtaaaggggagacaaatagttaggtacaaagcagaaagaataaggggggcagctcactggtcaagcactgccagtcaagcatgaggactggagtttggatccccaggacccgtgcacatgctgggtgggcgtggtggccagtgtggaccttcagccttgggagacactgggatatccagagcaggctggataccaatagtacccgtgtaggtgagtgagccttgggtctgattgagaagagaccctgctccaccaatgagtaaggcaggagagagagagagagacagagacagagacagagagacagaccgagagagagagagactgaaagagacagagagagagccgggaaagcagtctggggcctccacactcacgtgcattccctccccacacctgtatccatacacacacatacagatacacacacacacacacacacacacacacatacattcccacacacacacacacacacacacacacattcacacacactcatatgttcacacacacaaacatacatacacatacatacacacacacacacacacacacacacacacaaaacatggaaacagaaagaaagggaaagaaaaggcgaggggaatggcataggatccaggaatgacttttaacgtggacctcgaggcaaatgtgttagggaacagacccaaaggtctatggtcagagaagaggaggagttagcagatggtcttccatgactgtggtgactgctttaatgttgcatcaactgcatgctgggaatatcctccctcatttgtgggtgaggctgagtgaggccagatgctttgttcacagtcacacagagagtccctgacagaactgggatacagatgtgacccttctggttctggggtttgtggcttcacagcttcacttgagaatgcaatcaacacccaggatgattacctggtacccactgtcactcagtccctcagccaggctggaagctaagggggagcatggagtgaaagcccagactccctgctgtcttagaaacatcacactctgcccacagagaggctgaggagagaagctgtacgtcagggttattgctaatacctctgcttctggagcatgtcttacctgcagaagaccacccgggtcacctctctagcttgtggaaatagaattcatttcgtagggtcattccaaatcaagaatttaattaatcttcccagaagcctctgttcccactcggagcccaggtgagaaatctctgaggaaacagttcagctttgcccatccacagtgtgtgcagccttctcttggaagctgtctataggggctcaataaattgcttgttgttaaacagagagatttattcccctgacacccacatggcccccttgctttattttaaaatatatcaactaacttaccaccaatgcgattgcttgtaatgtctctgacacatccaatttctcaatagctcaatgacaatgtcatagtaaagacaggaagacgggcgggggagggtgctggctgtgtagactgttgtcttaaaaagtgtgccacaaggacacctgctcagaagggactccggtaacagactctgccgctggtttgggaaatagattagattgcatgggaatatctcttttatatatatcttttcaaaacatctgaccccatgatttttgtcgttttagttttagttttgttgctgaattgaatccagggcctttcatatgctaagttggtggagataaatccctaaccctgttttattgtttgttttgggttttttttttttttttgagacaattttgctgtgactctcttgtagacctgatgttcactgtatcactcagactgtcctcaaacttactgcaatacccctccctgcctagttttggggtcgactggcccatgtcactgtaccatgcttgagcctttttcctcagggaaccaacccacgctcccaggttctttcacaagaagtatcaactgtctggctggtgtcttctttttgctttgaaatggggtctctatggagcactagctggcctggaacttgctatgtagaccaagctagccttgaattcacggagatcccctgcatctgccccctggatgctcagattaaaggtgtgcactagtgctgggactctgactagtgtctttgattttccatggaaacctttgttctggaaagtattcctgttgctgcattaggaattctggagttgaaggtgggatgacctgttcattccacacagtgagattctatgctattgaactatcagccctggctttggtgggtctgcagatacagaggacgaagtctctgtgaaggaaaaggtagctgcagacggtggttggttcttcagctatgcgccaactgtggttcatataaaccggctgatggaaactcaagattccttgtctttaagagcagggtgttctgtagtacccactattagggttgccaaggtagttagagtgacactgttagtccagactcttaaagctcagtgacatcttggtcctaagggaagtcagggtgcattgtgatggctgtttccccaccagtggcccctctgctggcatatttacacagaaaccatctgacattgacagtacagaggcagggcatggcagtggacatagtctgattctgccgtcacagactctacatgagtactcctctgagtgccatggcttacaaggttacaggttcccaaatctatgtttctctacctggaaatgggtgtttgccatctctcctaaggtaggttctgtggtagccaatattgatcgtcagtttggtagtatctgccatcacctagaaggcagactttgggcacacctgtgagggggtttctagatttggtgggaattgagaagggaaacccactcgactgtgtgtgagtggcacagttccggagtcagggtcctagagtcagggtcctagagtcagggtcctggagtcagggtcctggagtcagtcagggtcctggagtcagggtcctggagtcaatcaaaaggaaacagtgagctgagcaccagtgctcatctccctctgcttcctggctgtgcaggcagtgtgagcaatagcttcacagcctgccacatgcctccctgccaagccttcccagccatgatagaccaacaccctcaaatagtgagaccaaacagacccttgcttccttgtcacagcagtgaggagagtgactggtatacagtcttaatgtgatattcaaccccctgcccccggataaaatccagaattctgtctcatcggtgttgtatagcgtgtccataagccttcagcaggtcatccagtacaaggcaagatgtcctccttggaaggaccctagtgcatccactggtcatcttgccctaaagcccgactgggaatgaagaaatgacagacccatgaacaggaaagctggggccaggcatgttgtactctctgatggagctgcaacccagaatgcacagctcagggggaggggctagttttgattggcagtaggtgtctttaaggcagagcttcaggctgcagacttcaggagaaggaagcttcagtcagtaatgttttttgcactcattggtcgatagtaaatgttcacacttgcacacatacttaacattcacacttgggccagaggaagataaagaaggaagtccttggggtcatgtatggtttattaatatacaaatcaggatcagtgtactacactcacaggccagagcagagctgccacaccgctgccactgttcccaccaccgctgccacagtccaaaaaggatgagcactaagccaccagccacaaggactcctgtgactcgctgccagcttgaccacaccccagagagagtgcctccccccaccctggccttttatataggtattcagataccctccaattaaaaacttcccccttggggccaagcctctccttaaaattgactatcagacagatgacaggattcttgcaacaggaaggctttgccagttccaggtctgacccatatgggtaaggcgtggccagcatcccatggctctgatgtcttcctccttgacatggcattttcatgtcaaacagtacacaaaacttcactggaacttcactccctcagggtttccttggctcctcaaacagctcacttctctgcaggtggctccttcccttctagcatgcccctcattctacttagactctaaccccaaatatggccatgtattttgcttcctgtgtaaaggattcagctagcccctcactgctccctggagtcaaagtctggaatcacttcccagcctgcctcagtgccccaaggacctaccagccctgtctgagctcgccaatcccttctgtttccatgtttgctctcattcttcctgtgacaccagcgtgccgtgcccctccctgagggccctccttggttgttcagttgtcacttcttctgcctatgctctgccatgccacgagatcccatagtaacttccatgctttgaccatggtatttattacatcacactgaatatatttttagctcgctatatccttgacatatgagctccctgagtactgaggggacattctgttacatttgagtttccagtgccggacatctaatggcatccgaatctcatgtttgataactgtgctggccagtgttgtgtctgattgacacacagactagggtcatgtgggtagagggaacctcagtgagaaaatgcctccaggttgccctgtggtcaaatctgtggggcatttccatgattgatgtaggagccctccatcccagtaaatgatgtcacccctggacgggtggtcctggggtgtataagaaagcagactgagcagaccagaaggagccagccagtcatcagccccatccatggcctctgattcagtccctgccttcaggttcctgccctgatgtcccttcatggtggactttaagctgtaaaatgaaataaactcttccttccccaaggtgcttttggtcatagtgtgtttaatcccagtgagagaaagcacatgaagacactataaagaaaggaaggcatcacctcccttctctagggcaccatctggcctaagagtagctcacctccctcctgctgccacccaatacagtgcagctttggcatgggcctgcaggcagccgtaataaaagactgtgggctggggaggtctaatgagcagaaatttcccccttacaactctaggaggtctgaggatagagaaccaacatgggcaggtggctgggaagaggggggcactctttcgggccacatattgcaagtaaagtacataatcacatgaagggaatactctgaaagctgtcgatgctgactgtattcacgagggcactctacttacaatataatcacccttcaaagtcaccgtgagcaaggcatggatgacatgggtctgtagtaccagctgaggaagaaacacctagaggttcagggtcagactgggggacatctctaagcccatttctgaggaagcaagtcctgtcttctgatatacaggtggttggattaagacacatgaatctgagtggctagaggcacccgtgtttgacaccctaaaattgtcatgtttgtcagtggcgtctgagagaagtatggggaatctacaatcacactgccatggttcagatccctgcagctctctgagaacttttggcatacacgtgttggtcttatcacattaaaaggagataattaggtattcacttctttagcaggtcggtcgatctaagggttagatcacacataacgcttacaggaaggcctggccctaggtgtgctcagagggcatgccttgtgctgctggttgtgctgggatgtgagtcttttaacttctctgtgaccaactacattctcgctgccccagaatctgtgtcttgccctaacaccacctggcttcatagttgttcccaaatctgaacctcttggaagttactacgttcttgtaagatattccaatattctagtattgcttctgaagtttttattctgtgtttatagccattgatgggggagggtgtcctaaccaattgtgggtggtaccatccctgagctggtggtcctgggtgctataagaaagcaggttgagcaagccagtaagcaaggcctctgagtcagctcctgcctctgggtccctgccggaactgagttcctaccctaactgcttttgatggtgagctgttacatggagctgtgagtgaaagaagccctttcctccccccacttgcttttggtcatggtgtttcatcacagtgatagtaaccctaacaaggacagaaactagtactggaaagacggggtacctctgtgacctgaccatgttgttctgggggagtattgtggaaggctacaaaagtcactgaagctacaaaagtcactgagtgttcaaagttcagtgatctggctgttctgtgagagcttggacgatacggtgttgagaggaatccagaagacaggggaggcctggctcgtgaagttccagagggaagtttgagagtcacttaaagactctctcagggctgttttctattttgagtgaagattctgtggttctgatcagctgggcctgagaatgagctgtgattacctggagactgacgccactaaagcaaaacccttgttgagtggtatgagcaatgctggttggctggagctgagaaattagtagtgattgagaagagaccagcgtcagtggggtgaaatcttctgggcagcgtttcctaagagtcggttcacacaaagatgtgttccagaggcggccaaggttgtacgtctggctggcagctgtaagagtcacccagttagtactggttttgaagacatgaaggggtcacaaaaagcagctggagcttggcacgtgaggggacaggaggggacgttgaaggtgcagcttcagtagcggctgaaaacccaggactgaagaggtcatgggagagagtcaggcttggcaccatgaataaagcccaagagaggctgttggtaaaagtgcagcccagtggcagccgagaccccagcattttggaaatgccagtaccattggagtccaccaagaatagaagcagcattggaggagacccactgcagagcctggaaggcaaactttgtgtgctacagagggcagagccagagaagtgagtgactcacgccctttggaggagcccagaaacctgtgagtgaatcccaggtgtgggacgttatgttatttacacgattagagtttgcttttgctttgatctgattgtgtctgtgccctggcttttccctgaattaagaaagcatttaacttatttttatataagagcctgtccacagttgagagaaatgttatattttaaaagactttggattttgaaaaatactgactttttaggtgtttgcgctttccccaaaaggcattgggacttttaagtttatacttttttttttttgagacagggtttctttgtgtagctttgtagaccaggctgcccttgaactcacagagatccacctgctctgcctcctgagtgctgggattaaagacgtgagcaccaccaccaccaccaccgccgccaccacctggctttataaaatgttttgtattgtgatgtctttattaatgtgtgagcttagggatgaacaagaaaggtaaggtggtggcttagcagtggcaggtttgtgtgtcatgttgataataggtcagtttatgtcaagttgacacaagctagagtctttggaaaggagggaccctcaatggagaaatggcaagcctgtagggcatttttttaactagtgattggtggagaagggcccagcccattatggtggtgccacacctgggctggtggtcctggcttctataataaatcaggtttcgcaagccagttagcagctctcctccatgacacctgcctccaggttcctgcccggcttgagttccctgctctcaccgctttgatgatgaacagttgtctcaacctgtgagtgaaataaacccttccctccaatcatcactgaccattagccaatatgacccaacagaagaaggacagcacaccatgatcactgggctccaaatagcgctttatttattttttttccaggggtgttttgaagttgtctcccattctccatatatagttcacttaatttttttaacttgagaaatgacacccagctcaaaccagatagctgacagtggagtctgaacaatcagggagacttaagaccttcccagaatcagccgtcacccccgtctgtggccactttgaggctgatacacagaggcagtccaaggtctgtcagtgagtagagcgctaagattacacgaggtgtatgtataatccgcgtcaactctgtgtaaacaggacgtgtttatcagttgcgtggttctgggtgtgtgtccacaggctggatagctcaactgtctgaagctgagggaggggcacatggtaacatcttcggaactaacggaacggtgttggattgatggatggtgcaggaagtgtctctctttgcattgtgttttgaagcccaaacacgggagcctctgggtgagtttacattcgtggtggtaatatgttctcacccgagaccttctgagcttacactgcctgtaatccttggtgtagctcaacgctgaggcattgacaagcccctttgcagccttctctctaaccctggagggcatacccaccatgggaagcctggcttctaagtttggttgaaagagcccctgctccccgctaagggggcctcttcagtgccacctcccagttgtcctagagcagggctgtcttggcagaagaccattttcctcacttcctgtgctcctgttgcctgaggtgatctgatacatgtgcctatgtcctacattcagtgtccaaatgccatcctgtagagttgtgtaccatttccacatgtcctagaggttcagggagtcaggggaagccgcaaggttttcattcagtgtgtggagattcatggtaaccagtggttatacccacagggttcttctaaccaagaggtagaactgtcttaccaaataccagagcctcaacttcctgtttaagcagtgtattgtgtgtgtatgtatgtatgtgtatatgtgtgtatgagtgtatgtatgtgtgtatatatatgtatgtgtatatgtgtatgtttgtgtatgtgtgtgtatatgtatgtgtgtatatgtgtgtgtatgtttgtgtgtgtatgtttgtgtgtgtatgtttgtgtgtgtatgtttgtgtgtgtatgtatgtgtatatgtgtgtatgagtgtatgtatgtgtgcatatatatgtatgtgtatgtgtatgtatatatgtgtatttttgtgtatgtgtgtgtgtttgtgtatgtgtgtgtatatgtatgtgtgtgtatatgtatgtgtgtgtatatgtatgtgtgtgtatatgtatgtgtgtatgtgtgtgtgtatatgtatgtgtgtgtgtgtttgtgtatgtgtgtatgtgtgtatgtatgtttgtgtgtatgtgtgcatgtttatgtgtatatgtgtgtatgtatgtgtatatgtgtgtgtatgtgcatgtgtgtatgtgtatgtgtgtgtatgtttgtgtgtgtatttatctatgtgtatgtgtgtatgtatgtgtatatgtgtgtttgtgtatgtgcatgtgtgtatgtgtgtgtatatatatgtatgtgtgttatgcatgtgtatatatgtttgtgtgtgtatgtgtgtatgtgtatgtgtgtgtatatatgtgtgtgtgtgtgtgtgtgtgtgtgtgtgtgtgtgtttgtatgtgtatgtatgtatgtggggggggcacaggcatgctgtggtgtgtaagtggaggtcagagagtgccttccagctgttaattcttgcctttcctcctgtgggtcccaggtattgaactcagatcatcaggctccctggcaagtactttacctggtgagccatctgtctcactggtggccactgacttcctattaaaacccatgaaacccacagagttatggaatatctgaaaatgcagcacaaaatatgccacactcgtatgtaaccagtaaccacgctgaggctaaccaggtctactgttgactgatcgctagtcgttgcctaattgtgacaagatgagtcttgcttctctcaacctctgcttccctgatttccagaggtgaagccagcggtctgagggggatgagaggaagaaaagagaagttctttctggaatggatgggactggaatagagtcattgccgagatggggcagccacctacctttcagatgggtgcagtacatgctctagaattaaggacaaactgtggggagaaccaaagttttctctagttctgccctttaacctgttcccaagctaatctgttctggaaggagactgtctcagatgtcacaccaaggtgcagatggaaagctcttgatgtttttatttacgttttgcctgcatatatgtctacagttaatgtgtctggtacaggtcagagggagggcatcagatcccctggaagtggaattacaggtgtgtgagagcctcggtgtgggtactggtcccaaatcctccagcagagcagccagtgctgtcaacagccaggccatctttccacccctagaaagctgcaataacagccagtgctgtcaatagtcagaccatctttccacccctagaaagctgcaataacagcattctttattttaaaaatgatgttagttacatgtgactgtggcagtctgctttcataatacatgctatacactatttactctgtagttactgtgtgtttcaaaacaggaagtagacatacaagattctgattagcacggcatcagaacactcacacccgagactcaatgctcttgacttgggagctttccacttctgacttctcttgtagattttctttatagtctgtccttgaactccccatcttaactctcattcactattttagcactcttctttcctttggtctcatcaccaggcatgccttaatgcttaatgatgcttaacttttgtatttctagttctgacttttgtgcagcctagatatccaaactaacatgttccccctctggatgtctctaaagcaaataaaaccctttctgcccccagataaaccagccttctgttcctcacccttctccctattctaatattgtattctctgtctaatgaactacttcaccagccagtgaggaaaaaaagaagcattctggattctcctcatttcttgtttctcagttgagtcaagcattgtgtagctatcctgtttggagcaccccacaggaccatcctctcctgctcctggagtctactagcccacaggctgacccctctcctatcttgctcttgctagatttaataaatactaaataaatgttgaatgaagacataggcatggaagtagagtgtattaaaataaaaaaatctctgcctgtttgacttgtgcatgaactcccctatcgtatatttctccagctgagctttcagagctaacccttgcttccttggaggtccatctgggtaggtcattcactgtgccggttttctgaagttagtgttactctcccatccattacgttagctctgtagcctgactgtgtttcctctccaccttatatgatgctatctggttctttatgtctgatactgaaataaatgttgcccaggaaaaggccacgggtgtctcactctggcctcatcttcagtaaaaactgcttgcgtatatacaactttgcagaattaaaatttcacccttgaaaatcttctctttggtgtggacagaaatttcacacacaattatctacagcgctgaaccttggctatggtgttcgttcataagcagtcccatgaccccacagaaatacagatgactttgtgccagctcatttttaggatattgctagctatatttaagacattaaaacctttattttcttttagactattactgagttaacaaaacagcttttggaatctgaatgattggaaaataaaatatggtgtagttatttcacagggggtatcactgtgtgttctactggggcataagtgtgcttctgtccgatcaaattccatagccattgaagaaaggaactctgtctcatcagtttgagtgcttggtcaacaaggagtggcactacttgccggagattaggaggtgtggccttgttgttgtaggtgtggccttgttggagtaggtgtggccttgctggaggaggcgtggccttgctggaggaggtgtggccttgctggaggaggcgtggccttgctggaggaggtgtggccttgttggaggaggtgtggccttgttggtggaggtgtggccttgttggtggaggtgtggccttgctggaggaggtgtggccttgctggaggagggtgttgatagaggcagactttggggtttcaaatgctcaagccaggcccactgtctttctgctgcatgtggatccagagaggaggtgtggccttgtagaggaggtgtgttgatagaggcagactttggggtttcaaatgctcaagccaggcccactgtctttctgctgcatgtggatccagatgtagaactcttggctccttttccaacaccatgtttgcctgtcaccgcctgtcaccacacttcccaccatgcagataatggaccaaatctctgaaactgtaagccagtcccaattaaatgcttcccttcaagagagttgccatggtcatggtgtgtcttcacagcaatagaatcatgactgagacagctatctaggttggatctgaaacaataacaagttaaaccctgatataatttcttcaacaacaacagatacaaaagagaaaagcccttgcatttccatgttcagtgtgtgcaagctgacctccattcatctttaaggccctatggtctttgggctggtttgtcttagcctcagtggctgacgtggtagtcgagaatgggaagtcgtataggactttctgctgccatagcttgtccatcgcacctgtagcccgttgcatgctgggaggtgagtggtattactgtattagcttccttcccagttgctgtgataactgtgtcatcagagctacttagaggagggagagtggagagtttgtcacttgcagttccagcttctcaactgtcatggcagggaagtcacagcagctggtgcttgagggagtgggtcataccacatccttaatcaggaccagagagcaatgattgcgtgcatgcttgctcctctcctggcgcaggggatggttccacccacagcagaccttcccatctccattaatgcaaccaaggaacccaaccccccttaggaacgctctgccaacctgatctaacattctttcattgagactctattctcaagtcatcctagattatcagttaaaactaagcatcaatcattgttcgcggagtgatgatttggagttacatgaatttagcttagctaacacttcccagaattcccttgtttgtatggttgtgtatgttattttacagatattttcatgaggtttggataacagatggcattaagcagtggccacttaggagggagcaggtgacaggtgcaacaatggcttaccctggtctcttggctcacatgctggctgtgcgaccatgaactagccttctgctctccagccctcagtggacctctcctttatctgtcgttagtcctgggctggagtacatgcaattccacaaaaaaaaaaaaaagaaagaaacaaaaaacaaaaaagaaacaaaacccccagagggtttcggtaaagcctactccggtcatggttgtctgtctgccacgagactcttgcaatgctgtggcctctcgggtggtggtgaagtctgcaggagagagacactgtcacgtagctgctgctgcttcttcgtcgtcatcttcatcttctttgtcttcgtcttcgtcatcttcgtcgtcttcgtcttcttcgtcttctcctctttcttctcttccttctcctttttccttttccttcttcctcctccttccctcttccttctttttctttttgaaaatagatgcttttattattattagaaagaagcttctttcacatatcaatcccagttccctctccctcacctcccctctcctcatcccctctaccttccccacccccatcccaagccctcccagacttcctcaaaataggcagttgaccagacaaaggctgtggcctgggatttggccagaagtccctctgcacatatagtcctactgtgggtgctggtcactctcactggaagaggaactcattttctattctccccactcccatcacccagccaccttttctctgatgggagcaaatcaaagcaggtcttgccacactgcttccagggactggaaaatacccacatcaaagaaatctattcatagattacatgtgattcacaccacctgagtggatgtcagctgtcagaaggctgagttctgttttggggcagaggttctcaaccttcctaaggctgcagccagccccttaatccagttcctcatggggtggtgaccccaaccataaaatcattttcattgctacttcataactgtaattttgctgctgttatgaatcgtgatgtaaacatctggtatgcggggtggtcttaggagacccctttggaaaggtcagttgactcccagaggggttacaacccacagtttgagaaccactgatctaaggagccctgtccttggggacagcaaatattgacccagagattccaagacgaccaaaggatcagggtccacagagtgcttccaggtgtctaacgtgtagatacagtagtatatgtgaggaaactgaaggtttggccagttcccaataaaactctgggctcaccgggtcatctgggaccatggtctgagttttcctgtgtctttcagtctcgctgtggaagatgttggtaataatgacgcctctccataccttagagctgttttccagaaacatggcaacaaatgagtaaggcacacaccagatgcaaattctttttattaatattaactaataagttatccagtccctgacagtatgttaaaatcacctttttaaaagacaagatagacattctctcttgctagaggaaagagaatccatttgttgatgtaagaactggcacagtcacttcacgaactgcttgagtctgtgggaacactccagggaggtgacggagagctgatcacaagagctctgttttcacatgcactcagttctgtttggtttgagcatggtgtcgtcttctacacaggagtcctatcaatccttatttcaaagcggcagcagaggagtgagtacagggcctcgggtagcctccagcattttctgaaatctggaattagctgtcaaattttgaaaatagaagcttagcctggcttacatagcctccccacccctgctcagggcaggagcctcagagatgtgcacagctttgctagctctttgcctggctcctacagccatctgtgtctgggttgaagacgcccgctccctccaggtgataactgtattattgcatctgacactattttggaagggatctccaggatagaatctttcaacaaagctttaaagtggctgtcaggaatgtgccattttctgtttactcttccacacagtgtggctgtctgcatggttacaggctctgagatgtgatgtcatcaaccccatgcattgttgacctactcaagcgactgggtccctgaaggtgagctgcttctttcccggttacatggcatgctgggaagtgaagtcccctctctagtcttcatcaccaacctccaggcctccttactcacactcagtctcagggtgggtcataccacgttacagttggtaattaaatgacagtcagaagcctgagctgtgagttggagatacggggatcaacacaatatcagcattgattcaaatgaattagctccctgaaattatcaatagtctaccaaaaattgcaatctttatccacaggcaaaaaatggcagattgaggaaaataagcccttttgtaacttaactttctaaagggtaggaaataccatctttgcatgcacacaactggtcaatattctctctagatagtgcaagatctctactccccaatgattattttaatttagaaaacatctttcattaaactctttagcctcagaatggaacacacaggagagcaaacccttttgtaaattaaaaatattattcagtgggagctgcgacttttaatcaatatggattttaataacctaaatattaagaaaaaccctccctagcacagaagtcagaggtgactgtgtttttaatattgctatatacatatgagaataccaagtatactcaacttcaaacaatccagtttgcattaacaaacacacataacaaatataaaactctcaccagacttcagatttcctcatttttaaatatctttatgaattccatgtcctagaaaagtgccttttgtttcatttgcttttctttaaaaatttcattttatagtctttatcttgtagaggggaaagaaagaaaaaatgcagctgaaaaaaattgacacagtgagagtcttattaggagaaatctcttctgggtatttcccacaggagaagatagtgtcagacagtgagctgctgtaatggcttggacgttaggtcagacataccacacagcagtttctgcccctttctcttgcccagtgtactggacttttatcaaagactgtcacagcattgatagccttgggtttttaaaaatggctgcctcagtctaattttggtggcaccattagacaaaagttggtaattatacgttaaagttctatcaaagaattaggggtaactgcagcagatccctgacaagggccaaaggtcagtgctgcactgaattagctcacaacactttaggtcatgggtgtcagcagcctccaacttcaggctaagagaagtcctgctctgtccaagagcatgtcttattttaggatggtcttagtgtgtgcaggttgagtaaatttagtgcctctcactgggtcccaaggctagacccatgaagtagaaggtggatccactcaggcttcccagctgcacagtgagtccatatagatccaggattttatttattaggagccaacagctaaagctgccttgaagccccctaaagctttaaacgttgttgtaacaaaccccacatggcccttggtggctgagaggctcagaatgtagtgtcatggctggggggcctccnnnnnnnnnnnnnnnnnnnnnnnnnnnnnnnnnnnnnnctctctttcctcatctctgtctctatctcctcaaatagtctccaaaaacaatgtatctacccaggctattctctccctacataaattctggtcccaagattcaacatggaaacagtttgggggaaggaacttccatcctgcctacactttgacaaactgttactgtaacagccattgaaagcctgcatattcttgagtattcaatatagtccttagatttccctcccaccgctgcagggatagcaaacactcaggtcctcaggcaccacaggtacaaatcaacttgctttttactccatgcttatgaaaggcaaaaccaccagaggaatttctcaatgttctctgtccctttgagtgtttcctttattaataccagtatattttaatagcatctgtgctcaaccctgcttcctggtcaagcctctccactttcatgatcttagcattcacgtgactttaagcgcactcttagccagttctatgaaacctcccttttgtgcagccctgcacagaatccgggagaaagcgaccctgctccagttatgttttccgtgtgtggggtgtgaaccttcaaagcacaccaagcgtgtagagctctgagcccgtcacatttcatgtcgtgaagaaactgtccggttacatgtaagattcggaagcttaacagagattcctttttcaggtcttgtttttttttaatctttaaaattttttttcttagtcagactcggccaccagccgagtgtggcttctcgtctctgacctgtgtgccacaatttgaagaaataaaatctaaccggactccaggttgcagacagcatgtgagagaccagcccaaggcccatcgattgagcagtctgctgctcccccccagcctggttgtttcctgctgcactgagagtctgtgccctgtgctggtttttttagcttgagtcttctcaagcgtgaaaacacagttacggattgttccgggagctcaatggctcagcatcttggcacttggctgtttttagcttctcaacaatagccactgtttgctccctccatctcatccttccttcagcaacgaggcaggcatctgatgaaaggctggtcacggcgtgcccccatggtgtcagtgtggtggcatgtgatggttcacatggggtgtgtttgatccaaggaagcccagcctctgcttgttcttcctttgttctgtcatctggagaaagagagagaaagtgtgtgccttcagctgctttccttgatttttttttcaccccaagaaccccactgtctggttccacacagaatatattcaccgcaaaagcatttttttttttaagtaaactaccagaaacagaagtgagaagaaagaccaactcctctatccatgcttaggaaacaggaagtggtgttgtaagaaacacaatctgttgctggaatcatttaacagcttaccaaggggcctggcgacatcatgttttacggttgctgaggacatcgtgtgataaatgggttgatcgggaccttagagtgacagcttttagtgaatgtctgcctttccaacaagcttggaaatccaaagccaggcaggaaataagatccatcaccaagagcaacatgggcccctccctgtctttccagtgagaatgctgcacaggaggtgggggagtccctgcttgctgagaaaccaccagaagccaccgcagcacagcacagttggggaattcctttcctggagtttctgggtccccgtgctcacagtggcagggtggctccagtgcccccccccacctcagctcactgaagctcactgacctgctccttcagctctgccagctgcccagatagctgcctcaccagacccatggtggactccagcttctcctgcaggttccggatctcgttttgctcgctgtcaccttcattgctgacaagtgacatggcccgcatccgaggaaaccagtccagattcttctcctaaaagaaatgcaggaactgggtagtgagtgtgggccggagccagagacactacagagaatgtttctggtcatttattattattgaaatctaaatcattgtggtctcacttgggcatggtggtggacatctgtaatcctagctctctgaagctgaggcggggactggccggcatggctatattgtcaatttcaggccagcctgggctacaaagcagcactgtctcaaacaaatcccaaagctcagtctctcagcatatacaccaaaggatcctcctctggccaggggcaagaagaggcagcattggtcctcatggactgggaaagaccccagcgatgacttctccagactcccaggtgatcctggatgaagccagcatccagagatggaggatgggtctgaaggtagcaggatcggatctcagtgtgtgtttgttgggtgggggggggggcaggagataggaaaagcatgaactgtgcccgcccatgcctgggtcctgcccatgttctctgctgaggttctttatcagttctgtggcccccggctccatgtgggggaggaggggagtggaagggcgtggcctggggtcctactgtctgctccctgtggaagcagtgtgttacagtggtgccattgccccagatggcaatagctggtgccacttctgttattttctgggcagcctgtgtgtgtgtatgtgtgtgtttccccaccattgtgatagacacccctaagtctcagaaactcttcctaactggtgaacaccatagagtcagtgtgcgtaacttagcctgtatttttcagtcttcacttactctgcaaattgtaatgtaacccccatctccagcagattaattacccatgtcagagctgggaaccggaagtctttgcaccacagatcgtgggggccagcttctgaataccttcctctgtcacccctgcagggagcttcttgcttacaactcctcccctcccaggtaagtccagagaaaactctgcctgggttcccaaccacagggccatcagagccctctctttccccagagtgcagtgaggtgaggtgtttggactgccactcccatcttgacatcactggtccttggcatggcttcttgtgtatggggcacacgattccctgtctccagtggcaggaaaagtgactgagggtcatcacttcctctgagttttagagtgacagattcagttactctgaccacacctacaggcaggtatttagggatcaaaggtatgtgtgtgtagtagtagtagcagatcagaagacaaatggccagagtcagttttttccttatgccatgtggggcctgggaatcaaactcagatcttcagctttggcagtgagccctgtcctgggccctggctgggagctttgaactgaagctgggggtgatgatgatttcactttcctgccacagacctgtacctaacatggtgaaggcagcaacctcaacatcatcctgattcttaggatgtatccctgaaagtgaccagctagtcactggggtccctttgggcagcctttgggcagccaacagctgagatgaatgtacaaggatgacatccctacctccccccccccagctgttagaggagagcttggctggaaaagcacccttttctcggaggccaaaagtgatcatttctccatgtcagagtctcagaatgtcccagctcttcttctggggtgggaaataggtggccaccagaggagatgggacagggagagctcaggggacgaaagtaaaggctgacggtgtcactgttctttgtgtctgagaacagggacgtgggcggcactgagactattgagagaatctgggctcaaagataaacacgtcgtgtttctatcatatgagaaatctagctagatttaaacccttacatatctatacacatatactgtacacacgcgtacacacacatacatgagcagggtcagaagagacatggaggcagggtgggggtagaggagggtaacggggcacatgtgacttggaagaaagggagttccccatgggcagaaatgttggggttcatcaggtgacacagggtcagatgatcccgggagacacagcaattactgccacaagtgagggaaggtgaggatgtcctcactgcaggcacccagctaggtcagtcatgtccaaggctgcctgcttttcaggaaacaatggcagctctctctcagcagactctgctggagctgcccgggccacgggactctcattctccactctgtgtctgcattagtccctttgtttgctcattcctttcataattcccgcttgtgactcctgtgcccgtgctaggcactgggagacaatggtaagcagcacccagcctgggcctcctcgtcctttgtaaaccacaggcagtcacagacaacaaagacaaggaggtgccagggagaaaagagagtctgttcctgtcctctggattccattctctctttttaccccctttgggtagttcctggctagtcttcttgactgtcaaccaaccataatctgaaatggatatataggtaattttccagtgtttagactctcacctccagccccacctatctctgctgcaccctcttggcctcttctccaggcaggcactagctttatactgccatctctacccatacccatgaccctaagactaaccctctcccaggagggtcaccataggcacaaggaggacatgccctgtgcctgcctccgctcaccccattcctcacagagggattcaagactagcttgtccgtctccagtagtacctgttgcctgaaactgacctatggacatattctaactttacagaaagtcttctctgggcttagaaatctcactgagctcaagctgagccaagtttacttctgatgcccgacttgaacgtcaacactgaattgccaaagactgagccctcagcgtcagtggtaaatcatctgacaaactggcataacaggacacagagcttcagccaccccctccacacagaagacaagatttctacaacaaacactaccaatgaccttattccagatgcctagatcccatcataaataatgaaaagtttgaactgccattgtaatgtcccctgagaaaaatgacttagatgatacacaagataaggattcaaacagaaaaaaaatgatcccagaattcaaaggagatgaatatgccaaattgaagactgtagaaatatagttggatgaaataacaaaaacaactcaagacatgaaaacagaatttagtaaagagataccatctctgaagagaagccaaatggaataaagcttgaaatgaaaaattcctctgaatttgtttgaattcatgaaagtttccccaatagattggagtaggtaaaactattgaggacgaagtgaggaactagatcactcaactaaaggaaatgtcaaatccctccccaaaccccaagaacagaacatgtgggaactcactctataaaaaaagaccaaacctatggaataataagtatagaaggaaaagaaaatacataatttaagaaatgagatgcctatcaaggtctaatacggaaccagaaaagaaattccccacatcacataatagtcaaaaaaccaaatgtacaaaacaaaggatatttacaatgacaagaaaaaaagtcaagtctcatacaaaggtaggcccattagaataccaataaatttccaatggagactatgaaatccagacgggactagacctatgtactcttacgagctatgaaagacagtgggtgccaatgtagatgactgttcccagcaaaactatcagatttaatttatgaccactaatccagctctatagaagaaactggaaagaacactcctgtctgaagaaaagggtaaacatgtaggagggcacaaaaacaattccagacaccataaaatcaacaaaatgataggaattgacacacattgttcaatagtgtctcttaactgataataaagttcatttgatctcaatttcccaacaactagaaacagactatcagactggatcagaaaacaggatccatctttttgctgttgccaagaaacaggatccaggaccagtgatagacaccacctcaaagtgtaagtatgggaaaaagtatccaagcaaatggaacagtcaagcggcatagtgattctaatatttgacaaaacagacttcaagtcaaaactaatcagaagagatacataggaatacttaccctcatttaggagaaacccaacaggatattacaatcctaaacacatatgaactaaaattggagcaccaaatttcacaaaagaaaactattaaacataaaaccacagatcaaccctaacacagtgatggtggtgatttcaattccattctcatggacatacaggtcactcagcaaaagaaggaaactcgagttcaatgacatcataaatcaatagaactaacagacatctatagaacatcctatctaaaaattaatgaatataatgctctttttagcctatgggattttttttttttaacaaaatagaccacctattagaaaacaatgcaagtctcaataaatacagggaaattgaaatcacattctgaattttatctaataactaaaataaagctgggtatcaacaataatagaaatgacagaaagtatacaaagttataaatgctaaacaacacccttctgaatcaaaattgggtaaatgaaatcaagaaggaaattgaataataaatactattaaaaatgaaaacacatcatggcaaaatctatagcacacaatgaaagtcaccatatgaagaaagtttacagcattatgtgcttacatcaaaaactttgagaggcctctaaactaaaagatgcacctgacagtgcattttcctattcttagaaaaataagagtacacaacaaaagaaataggttggaagagatactcaaaaccacagctgaaatgaacagcatagaatgaaaataaacacaaaggatcaatggaagaaagttacttgaagagagtgacaaggttgataaacccttcatcaaagtaaccaaaagaattagagagtatccaaattaaacaagaaaagggagacactacaacagacattgaagaaatccagagactggttcaaatatactttaaagatctacattccaccaaattggaaaatgtaatgtaggagagacctctacacacccgtgtcgctgaccacacctgtttgggcatggccacaggtgcctaaggggcttgcagggtaaagatgggaggagaggggcacttgcctctcactgggttccagatgggtttggaaagctgctgagactggattcttggagcgccgatttgggtcatcggctcctcgtgtaaatgatttccccttaataaattaaccatctatatccatagtccatgtatggttaccttcctttacaatgtaagaaatggatgaacttctagatatatatgactgacctaaataaagatgaagtaaatgatttaaatgaacccacatcacccattgaggtagaagcagtaattaaaagcctcccaactataagacacaggtcagagggagtcattgttgaattctatgagaacttcaaagaagagctaacaccaacactcctcaaactatcctacaaaactacccaatagaaaaggatgaacattctgaattccttttatgaaccacactgttctgacaccgaaacaataaggtcagaatctttgatgaacatagacgtgaaacaaagccaattcaagaacacatcagaaagattgttcaccatggccaaatcagcttcatcccagagatgcagggatggtttgataaacttaatccaccacacaaacagaaaccacatgatcacctcccgagctgagaaaaggcctttgacaaaatctaacatccattcacaataaaaagcctggtgaagctagggttacagggggtggtctcaacataataaaggcaacatacaggaagcccacagccaacatcattctgaacagagaaaaactctatttccaccaaaaccaggggcacaggcaatgatggtccctctgcccacccctgttcaacatagtgcttgagtcttagctagagcaggaagataaagtagacacaaataagaaaggaaaatcaaagtatttttgtagatatgattctatatgtaaaagatctggatgactcctacacctgacaattcagcaaattagcaaaaaaaaaaaaaaaaaaaaaaaaaaaaaaaaaaaaccagtagtagacttcatagacacaaacatactgagaaagaaataaaggagataacaccatccacaatagcctcaagaaaaataaaatagaccaagtctaactaaagaagtgaaagatttgtgcaaatggccaccctaccaaaagccaacccacaggtttaatgcaatctctatcaaaattccagtgaaagcagcatgacactcactgatgaatggaaatgaggactcacatataaacccatattcctacatccacccagtgtttgacaaaagccaacaaatacacattggagagaacttagtatcttcaacaaatgctacttgtcagactggatggccacagtagacaaatgaaacttaacccatatcactcaacccttaaaatctctactccaaaggaattaaggacttcagcacaagaccagataccccaaatctgaaggggagcaagtgggaaataggcttgagctcattggtgtaagacaagacattctgaatagcaccctgatagtaaaaggctttaataccaataattaataaatggaacctcacaaaactaaaatgtttctatacagcaaagggtactattactcaaattaagaggcggtctgtagatgtgggaaaaaaagtctttacctgctatacatctgacaaagcgttaacatctagagtatataagtagctcaaaagttaaacattaagaaaagctcatttttaaatggggatgcacaaagctaaacattcagaaaaatgcaaacggctgagaaacatttaaaaatattcaacatccacagccatcaagaaacacaaattaaaactactttgagatttcatttaagcccagtcaaaagggccaaaatcaaaaaagcaaatgctgacaaatggtggcatggatattgggcacgggaacacttactctctgctggaggactgcaaagtggtgcagccaatatggaatcaagtgtggagtgcctccaagaagctgataataggtctaccgtgttatcctgatagacctgtctagggcatacatgcaaaggactgcatgtcttacttgagatatctaggaaaactctcaaagaactaacacaaatttttataggagaattaaactaaaaaatagatttttaaaaatcaatgcagcttgctgttttcacgaaaacaaccttaaatactgcatatgctgtttcttctttctattgaaatcagtttgtgacaaaacagccagatatccctctctctctacttttttttgcaaggaagtttccttttccctctgtgggagggagggaaaggcaggttgttacctgaccctaagccctaactgcaggcctgttggtagcctgggcgacttcctcatcctgctaaccagtgctgtgcctgcctgctaacaccgtggtctgatttcactttacacggcacatcttgtggtcatgctcatggcttttcgattcccaggctgatgctagctagtcaacgtgaaatcatttcctcatttcactagactgaagacgtgtgaccacagggtagcctaaagtcagggaagtacattagctgccagactcgtaggctgcgggttgatccgcctaataacttagtgacatgcagatcttctcagggcatctaaaatgcaagactcatagatgaactgacctttttctctgggatgttcatgtaccatccataatcctcctgctttggctaatttttataacagtgcgcctgtctgtctaggagactggaggagcaatagacaggagtaaaaacaagtccttttaataatggtgggtcagcgcgacctattaatgttgacactgttagtgtcacttagagaccacccgtgtggtgctcacatttgacattgcagagctagtgtttgggcaatggaagggcaccggttgaaaagatgggatatctgagttttgacttcctcacagcccaaaccatctatcctatggggcaaatgggtttcttactcgccaagtctcaggctgctcatctgtgaaaccagaagccttagatgtgtccataccttttccagcctggcattttatgagctatgaatgcaagaaaaggctctaattcaaattgcttcaaatagccctgagcctggcaaatgaacaaacacacagagttaagactagaagcaacactgaatcacagagctcaaacccagtgagtatgtatgtgcacacgcatatgtacacacatacacaccggcgatgatggtagtaatccctgaactcactccatttctagatgtgactgaagggctcagtgcccccaggcctcctgtttcagaactgaccacaatcttgctaccacagaaagagcatgttttgtcatgtcagatgagactaagaagtaatgagaatggtttggaccaacccaacatttagaatttgtctttttaaaaagctattagcatttatgacacattgcctgcctgtaagctaaagggaaagaagttctaaccatctataacagaacaacagatcctacctgccttctgagcatttggcatttagtcatgttatggccaatacattcaattccatagagcagggatgctacaatctcactccactgtctgcagcaccaagtcaagattatttgcccaagcccatagaaggttgagtggctgagccaagtgttgggtctctgggaatcttttgttcctctgcctttactgggtgactttccatgtctgatgggggcactgatacttggctactccagaagctgaggtacaaggattgcaagttcaaggcctggcccagctacagaatgagatcaaagtcaacctggacaacttggtgagactcagaaagttggaaggtggctcagcttccaggtgcttgcctgatcagcaagaaacccaccctgtattcagtccccagctccaaaatgtctggcttctaaacaaacaatacggagactattaaaactggagtctcttgggctactttctcagggtatgctacaggttcatttattgaagatcaggaacacatgccagtattgaagaggaggaaaagaacactggaggttcagtgaaatttggcagagggctttcaaatgttgctaatgagaggcaacacagaatgaactctgtactacaacagtagcaactaaccattggacacccctttgcccagattcagtgctataaggtggcacttagtggggctctcatgagacccacttggttgccatcctgaactgggctctgtgtttctaactctgtttctatgatttcccatcataaaattaatttgcagagcctcatggaatgaagagaaaagcaccactgttgcaagtgaagtgacagacgggctcaagagtccccagacctcatggtttgaacacagtgaaccacgaatcctcaggtgacatcaggcagctgtcataaggcgagaagttatgagtccaagtaggataatgggagagacccaagctctggacttcactgagcaccagtcaggcgggaggaaggggatggtgtatgtagctccagaagcagaaagctgcctttgaataatgacttcaagctgggcatgactttaatatgcctagtcacaagagacatgaggctctgtgggcaggaaggcaggaattacagccacgcgctgtgccacagagcagtttcacagtcatgctacatggaagtgtccactgattgtccatagactctgtgattccaactttggtccaactccacaaacaagctttccattttttaagctaagaccacttgggtttcatatacttgacccttaggtaggaactaataagtggcagcgatgcctaggcccacagcagcagctcctgcagctcagacaccatcccacaaggcagaggggtttctccatgtgtgcactgctccttgaaaaggtgtttactttctcaaatttgtcttcctcctaaatcttgaacaggaacaagatgctgttgggttatgggctcactacagtctctttcatcccttctccattctgcctggcgagttagggccaatttgaaatccattagcctgccagagctttgaggattaagctagttactcttgtgtgcgtggcccattttcttgtcaggactgaattctctgcattacacataactgatggtgctggtactcctcaaaaatcaaagtgccagcaagtgctcacaaacgcaaacacacagaaggacgatgtgcatatctatgttgtgatttctcattctttctgacggggcatgcggagcaggtgagctgctgttccgtccttgcttttctctccttccctatattcctatattccagcccccgcctgccccacacaaacaggaaccaaggtgagccacggaggaccgtctggtgtgccgagctaagagtgttggagaggcagtctgtgattcccactttcgctgctcaagcagtgtttgataggagatagtgactgtgtttctgacagtggataggtagcacccgtctttcagtgggacaggcagcgtaggtatgtcatgtggcaccatatggttagggcaaagtacccagtgagtgggaggtgtactctgtcactgcctcctcaggggattatgacatcctgaaattaacacattttcagagacttgaacaaggactcaccctggcatgtgctctgcaatttcccccatgccaattgcaacttgggactttcggagggttcttcatttaccctgcccccccccacccctctgcctgctaacttggtattgtactcaaaaaaaagaaaaaaaaaactgtcatttcgagatgtcccttaaatagtttcaccagttttgcaaattcctcatggctacactttcaaaaatctactcgccatggtgtgggaggattctacttttgtctcccttgttttaaggactgcctgtggttatgcttcctaaggaaagagggctgtctgcccggtcagtcagacctgacatggtcacgtgttgggaccactgctttggaaggaggctcatgacaggaatccccctgcacttcctcctttaccgttcaggctaccccagaggggcctcagagagccattggccgtcaccaagatagatgacaagtctgagccctgtgtgggtcctaggctgtcctcacacagtgactagcaatggaaggtcagaccttggagccacagtgtcacgcttagaaattagattctaggagatgtctgcgctttggcccagtttgtggcttctgtatgcagactgtgaatgcacgcccacttcaaagctgacagggctctttagtggcctcacaaataggatttattaggatttaaattttatcatcagaatggaaaatggatcctctctcccgtgttagcagccaagacttcccataccccgtggaactcacattttcttcagctctccaggagctgtccttcagccggtgagcctcaccagacagacaaggacatgtctgtttctcaactctaccactgagactttactggaattggccccatttttgtgtgaccatcatcatttttttttaaaaaaagacattgtaattgacactttaaaaatttaatattttgcaggcctggagacatagctcttgtgaatcttccagaggacccaggttcagttcccaggtactcatttggtggatgataaccaactgtaactccagttccagggaatctgacagcctctcctggcctcatggacatcaggcacacatgtgatgcgtagacgtgtatgcagacggaaacaaccatacacataaaatgaattttaaaattaattttcagtttttcttcctcccttttaaaatatttttataattcatgtatttgtttgtcctacacggtgccatcgacaacctcagtttaactgtgttgaaagtcgggttgttggctgagaagctttcttgtctgctggaatcatggcaacacctgccaggcccacaggattcatcctccatcggggctcagggattttatcacccatggtgcaatttcccctctccaggataagctttgttcaccccaacttgccccatcgcctcataactcactttcaatttgtttaaagacctgatgaagatttgatgacacaactgtacaccctgtctgtgatcatataaatggcataccattactgattagtccaggaataatggtaccttagtgactgtacccctagatagaggtctgtttaaggtagcacaacaggaacagagtattctgattttagaagtgtcttccttttcccctcccttttcttctttctcttctcaatccctttccctccttttatctttccttgcatactttgggactcaatcctggggcttcatgtacacaagtgtcccaccactgacagacacacaaggcaagtgtcccagcactgagctgccatcaagtcatcaggggactctgatgaacaaattcattaggcacgctgaaaggaagatttgtctggcagtacaaactccatgtgtgtgcagcatttaatgataagaccagaggagaaagtgaaacaaattattttgatgtatgccatcagattaagcaggacgatcttagatttccattttgcatgatgtcaacccacaaaaccacatgaaacggaccctcctgttaccctctcactcacaccagccacagcccattctatgggaccccagtgtgctgtgatggctgcatccaggctaggtacccaacaccatgccggtaatgagagactgatgaactctatttcacaacaccaaggcacgctcagttgtttgcagccgtctcaggatgcacacagtgtcgccaggatacacatattcctgggctcgtctacatgctagagaggggacccgtgctgaaggaggtggtcacagcaacttatctgtccggtctcctaaacatgcaagtcatacagccagcaagctcccctgcttccaacctctgctcattaagcaactctctggctcctcaggaaaataaatacaatggctgtctgtgtactggctggaaaggatcgtttgccatgctgaatcagggacattcaggcatatgtacccgctcgctgccttccaagtcggctaggggatccctatccattacactctgcgtgcctgcctgatagccttgtctaggatcagagcttgcaaaggctggcacaatatctgtactttgtcacccgagagagcccgtgacacggtactgctgcagggagaccatctgctgctttgtgtgacagcctccctgggtggtacctgggtatcactgtgttctatttttagcaaggctgtgtcctgactgcagttatctggtgccatttgggaccaacagtgaggaacatgaattgtgagctgaggtaccctggcagtgtgaacacaagtccgtgccatagcttcatgtcagggctctctggcaagggtcacgtttggtctcttcatccagtcaaaccacctctgtgtcaggtagagaaaccaagaacaccaccactacagagactgatgaaagcctggttgcccgagtgtagtagctaacagtatttttgcttctgtgggagaacagtggctatccctagtgcatgccaagacttgaggactggttcctgaagctttgatgggacaaatcttttatttcctgaaactgaattttttcactatttttcttctctttatgggaacatgtgtatggtgtgtacatatatatgaaaaatatttgtgtaagctcacatgcatgtggaggcctgaggctgatgttggggatctcctctattgctctcccccttattctttgaggcagggtctctgactggtgtggctctccttcctagcctgcatgctctggggattccctgtctccatcttttgaggctgaaattgcaggtgggccacctgggtcaccatgcccacatggcatttccatgtgctctagggatctgaaatcaggttcctctagtttgggtgcaagtgtttttaaacacttattgatctgcccatctcagaaacttgaattttcttctatggcatacagcatcctcaaactcatgatgtggggagatgtttgttaagtacacacatgtcaacctaacatgtgaagctgctcaggcttgtgtactaccacacatgtaaatgtataatgctttgtgtcttaaaataaaaatttgcatatgttttattggtgtccattattgtgccaaaacactacgaccaaggcaacgtataaaagaaagcatttaattgggcttatggtttcagagggtgagagtctgtgatgccatggggaagtcatggtggcaggaacagctgagagctcatatcttgattgaaaagcaggaagcagagagcatcctgggaatagcttgtctttttgaaacctcaaagcccacctgacacacctcctccgataaggacacaccttctaatccttcccaaacagttccaccaattgaggaccaagtgttcaaacatatgaacctatgggggccattctcttcaaaccacacacgtttattctagaaattaagatgtaatagagatttgccttgtatgtatacatgctcgtgtggtgggtgaaagcatgtaggtgtgtgcattggccagagatcaactttagtcatcattcctcctgtgccatttaccttggttttttggctttgtttcaagacagggtctctcattggcctagagcttactcggtgagtgactctggctggccagcaagccaaagccacctgctgtgttttgcttccccagtgctgagatcacacatggaggtgcaccaccatgcttggcttttaacatacaggttctgggactcacactcaggtcctcttgcatgcaaaccaagccctttattggctgagtcatcgccctggctgccccacgactggctgtggaaatgacttcatagaggcacaggttctcaaggattctcaaggatcataggaatgccatgaccagcgcttctacccaagtaagacaatgtgagaggaggtggccgtgcccaccaagccagggagcacacaatgggcgaccctgagcacgcagctgtcccgcagggatgccagcctcggaaccatgtctggagtgaacggtttttaattttgacagtaatcttgctcactatcatatttaccatgaataaaaggattttaagccagatcatgaaaaaaaatgtatagaacatctttaaaaaaaatcactggatgagaaatcctctttatgtaattaccagataaacaccttctcttgctgcctgcgtgttgtagtggttagggaataatgttcctatttcctaccaccttataacgcagtgtggccccactccccatgttccctttgaagacttaaaaggcacttcccatgcgctacagaaaatgtggtttctgctagattaatgcccaattgcgccgacaggatggagacataagaaaatcaactaaattagaagtactgaagcttcgggttttaactacaatttcacgatcatgtgactgtctttgacaaagcttttgccactggtccccttcatcacttttagtttgatttattcatactgttacctattttgcagagcttctttgtcccttcagttttcctcagagtttttgttagcaggctatctttaatgagatgacccggccacacccctctgtatgctttaacttcagaataaaatctcccttcttattgccggattaacattaaaaaacaagccaccatgttcctctccactgctattctaggatttaagattagaagactagaaggaaaacatgcttagctgtttgaggttccaggcgccaaaccctgagcctcacccatgttgggcagacacttttccctgatccacatccctggcccaagaaagtcagtttgggggaccattgtcccactcacccatgctgtggccttcacatatatgtctatcataggatgaaatgatatgctccacctagaagagtatgttcccctctgagaaggtacaatacatcaacctgcagagaactcttctagaaaaggaaccgatgctaatgcttcagcagccacaagaagacaaaacctttcggctaacctccaaaggaaacctttgcagttctgtaagctgcctctgggccttttctccagggagcagagacagcatcagatggatactgggccctagagaaagtcaccctgatggcatttgtgaagggcataactaatcttgcctgaattctgattagtcaaaaacagtgacttgtgaacctgggctttgaggataatttaaaacctcaacttccaccaaattctcaaccgataaagcagttcttggtagctgagtcctactgcatgacgacagtggactgcattctagagatggattcacagaacttacacatgtttggatgtggactattccctttaaaggtcctcaatcaaaccgtgcgaaattctctatcaaaaactgttgctggaatcgggaagatgtaacaatatgaaaaaaaaaaccacatcagtgttatttaaaccaaacaaagcagctctaactttactatgacatcttaatcacctctactaacttgctcgacatggcactgtgtgagagcggggctttgcgctctgtgattgttgtagcctgatggatttctttctcctcagttcacctgcgctctccaaactctgtattttctttattaaagatgatttgatctcagcttttattacatctgagaatgagacacagatgaagataggaagggattctatttcatgaagcaggtttgcttgaaacgtgaaatcagagaaaagaaacctcgtgaaatgtagataggaaaatcaaaggaacaaagaagttatatgaagagaagaaaacctggaaatggaaacaaaccaagacccagtgtggagaaagaggaacaaagagtcacatgtttattctaggagagcctgctgccctgtgggttcaagtttgggtctggaatgctcagaaaggcttggggtctagctggtggtggaactgtgaggtggcgacgcgggacctggttgtaggaggtaaactgaggcacatccttgaaggggatacagagaacctgtcctttcgcttctccttcccagctgccatggtgtgagtgactttgttatatatactcccccatgacttctgccttccactcaggtacaatgtgatagggaccaagatactaaaggctcatagttctgaaacagaagccaaagcaaaccatctctcctttaataatttatttcagggtactttagcccccacggtaactgaaagctgattaacacactacaatttgagcagatcaccagagaaaccacactctaaccctgttttaaaccacactgcccttgcctagtgtgccttgtgtgtctatactgatggtataggacagaattctctcccttctcgggtaaatactccactggacgaagaagagaagagagaggctcagtgtgcattgttgacctaaacctgaatgacttctatccatcttgtcttttgacacagggtctctcatcgcacggagttcagtgatttagcaaggctggctgaatagcaagctctagagatcttcctgtccttcaactctccagttctgggattactatcagacaatatcctgtctggattgtggtgatgttgtgtctgtcgattctggggattgaactcagggcactttactaaataagctattactccagccctcccaagggtcttttgacacagtcaataccctgtattttgtgaaaacaaaccaagaggaagtgaaataatttggatactctctcccatcttcttcattcctgaagttccatttaagtgtgtgtagaataatgagttgctggaactttttcaaatattggaagatctgacgaaggtattctctgaagaactgactaaacaccccacagtgtccccatcacagagagaaaaacaaggaagctccctcaaggtggagatgtcagccagacagaattccttcttgcatggcctcagcatcaaggcttctgctccctttcgggtacacctgtccctgcgtgctccctgggcactccagatggttttatgtaaccatgctaaaaactgtcctgagaccttggaaactcaggtagatccagagttcctagcaatacaaatttacagagttcctgacgttcaggtttatcaaaggctcatgtgctgtaagaatttgagtttggatcagacagtaacatacagaagtccctctggccagacttttccctggtggccacactcaccattaaatcatgaggaaactggtgtttggggtctcccttctgctccaaacatgaactctccctttcttgtcaattctgacctactacaaaagctgttaccattgaggacacgggctccgtgtctaataaacgcagggaagagatgagcacagctcactcacatgtatagtacgctcctcggagcagagtgtgtgggcattaaatggttcgagaacactttgcatatgcaaaggagtgtttccgtgtagccacgttatttgaattaaaccagctttttcagtaggagtggaatggtgaagcccttgttcaagatctacaagccactcacctcatttggcatggggatgcgtgtaaatccacacaggatctcagcaagcacaagacacatggttcagaggtgaggaaacagacccagaaagctggggttgcctatctcagacactattatttcacaaccccttcatctctcaatctcacaaagtatcggagcccactggttgtgatattaaatggctggtctctcacatacaaatgctgaatcacttctggaaatttcagcatctatttttccaagatttttaaaagatacaattagtaccaaaaccccaaggaaatgagcttgcccgataaccttaccccatgccaagcagtgtgtgcagagtaactgctgtcttaactaattgcttgtaatggggctcgggctggcctggcctattacaagccattagcaagggtcttgtggctttaccgtacaccgttttcattcccacaactcacatcttgacggcatcagctactctctggaagaaagccagcatttctgagtaaaatatatcagtcctaacaatgtggatattattattccagaaagccgactgagaattcaacaagaccttacagtaatgaccagaactgggaaacgaggattttcttcggcacagcagggagaaagcttttcgctggggtgatgaaaacgagagatgtgaacatccctctttaagctggaaataagtgactgagggtctgcatgctcaataaaacatctgggttgcagtttcatattctgcaaaccttacggtcttgggtcacagtctactgaccagtcagaccgcgtctaggttcactggctggtgaaagtcacctctttttagagaaagttttttcttctctagctctgcattttgttgagtggagcagatacagcataatcaggttcagcttgctgtcatcatctcgtccctctgaagagctatcgtccccttcttcactcactccacacagtctccaaaggagccttgtcaaaacctgtgactccaagtacaccacttgagtgacatacaactttatcatcagttaatgaatgtttttggtttatttattatttgtttttatttgatgtgtatcagtgcttgcctgcatgtatatatgttaactgaacgtgtccctgatgtccacagaggccagaagagggcactggatcccatgaaactgcagttatggcctgctgtgaacccccagggggtgctggcaacagaacctgtgtcctctgcaagagcagcaagtgttcttaactgctcagccatctcttctggctaaggaacctttgttgtatctactacatagcagacggcggtaaaatgttatctttgtggatggtacacacattatattctcccaatagctctggtccaatgtctggcaaggaggatttactctagctcacagtttcaacgtggagacaggggcatggcagcagtaccacgtggcagggactctttacatctaagaagaacaggaagcagactgcagacaagaagtagtcctgggctaagaagctcaaggccccaggagcccacttcttccctcaaggcctctaggggactgtacaacccttcccaaacagctctgccagctgtagaaccaagtgtcaaatccatgagcctaagagtgacatttcccatgcaaaccacaccacttcatttctgagttcccaaatggaccccagactcacgtcctcagtttcttcttaggccctgtgcccacagacaggaagccagtctggggcgaacacttctctttgccaccagccctgcaactcttgtccccctctcttgttcaatacccacaaccacacagaccagaagactaaaagatgctccgtgatcagcgaggcccctttaactctccgttaccgtgccgtctcctcaatgtgtgctcttagtcttgctgccagagagtgaatcattctagatttttcttttatttccaagatgtcttgtcatttcttgtggattatgattatgctttcttttaaattgcacttattctctcccctccccgcccccctggctcccccactctcgtgtgtgtgtgtgtgtgtgtgtgtgtgtgtgtgtgtgtgtgtgtgtgtgtgtgtggtttgtgtgtgtgtgtggtgtatgtatatgtatatgtgtctgtgtctctgtgtgtgtggtgtggtattgtgtgtgtgtgtggtggtgtgtgtggtgtgtgtgtgtggtgtgtgtgtgtgtagtgttatgtgtggtattgtgtgtggtgtgtgtgtgtgtgtagtgttatatgtggtattgtgtggtgtgtgtgtgtgtgtgtagtgttatgtgtggtattgtgtgtggggtgtgtgtgtgtgtagtgttatgtgtggtattgtgtggtgtgtgtgtgtggtgtatgtgtggtgtgtgtgtgtgtgtgtggtgtggtatgtgtggtatgtgtgatgtgtgtgtggtgtgtatggtgtgtgtgtgtgtgtgtgtgtgtggtgtatatgttgggtgtgtggtgttgtgtggtgtggtgtgtggcgtatgtgtgtggtatgtgtgatgtgtgtgtgtgtgatgtgtgtgtgtgtggtgtctgtgtgtgtctctgtgtggtgtgtgtgtgtgtgtgtgtgtgtgtgtgtgtgtgtgtttgtgtgtgtgtgtgtgtgtgtgtgtatgtgtgtgtgtgtgtgtgtgtttaggtcagaggacaaactgcaaagttcagttctcttcttccacagagtgggtctggggacttgaactcaggtctttgggtgtggcagcagcgcctttaccacctcgtgccccagactgtgccttctcatgtgcccctctcaaccccaccttgggttcactgtctctgaatgggctctcttagctttccggatagaataaagactccaagctcccagtccctttgcactctgtgtcctggttggcacctgacctcttgaccgtcactcttgtcacagacacaccgtgcccccccccccccccttccacccaaccccctttaaccttcaaagctccaaggtgcaacctgaaggcagcttcccttcctaggttctgagctttgcagcaggccctgccctgctctacagtgttgcctgatgcagggctgtcactgcctttttattgacttcctgtctccctttctgcctttgagggaaagggaagcattggcctctgttctgagtccctgggtccagcctcatgcctgggacacagcaagcgctcacctgtgtttgctgagtgaatttatctttgagacacaaggtaagttcgactgtaagttagacactaagaactctattcctggacacaggagaatcagatgtccccacaaaggctgtcttctcttctgactccaacctccccatcctttaatattggatttgtgtgtgtttggccttagttaagtcgcagaccctggccttgggaggaggtggggggtgggtggactctacttcaagtccttattcgctgaacgccttgaatgagcctcagttttcacgtgacaggctcgtgaggtgaactaataagatgatgtgcaatcctgcaagcttagacactcttctcctgagccctccccgcctccccaccctccggaccccagactcacgtcctcagtttcttcttaggccctgtgcccacagacaggaagccagtctggggcgaacacttctctttgccaccagccctgcaactcttgtccccctctcttgttcaatacccacaaccacacagaccagaagatcacttctgtgaagcgtctctggtgcagaagttactgctttgccctctctactgcagccgctctctgtcatgtctgttttgttcagcaaatctatgcaagtgcccactgtgcaccaagcactaactctggactaggaagacactggagcacaaaaccatctgtgtaaatgtgctagtgggggtgtgttgtaacagtagaggataaagaagccagtgtgcgcaacaagtcacggctgtaaagaaatgctaaaaggatggggcccattttggaggcttatacttataaccctgacatgcaaggggctggggcaggaggactgtaagcttggggacagcctgtgctggagagcaagtcctggtctcaaaaaacagaggggggaagagatgacagagagagagagagagagagagagagagagagagagagagagagagaggagagaaaaggagagggaaggtagaggagggggggtaaggacaaagagagggagcagtgggaatgggattgggatggaaggtgacaggaaacacggccagcgacatgaaagagtcggggcacacgaaggccaacagactgcacacaaatgccaaggctgtggccaggcaaagaaaggcagagtgttttctaaacaaaacacaaacccacaatgtcaagctagctgaagtgtagctggctatgaaagcaggtaggtgaaatggacctggtaaggctggggccaacctgagtgggaggtccaggaggaactgcgtcctaggggaatgattacgtctcttcagtctctctggctgttggcaagtccgtcctcctccatgtggaactgtgaatctgtagaacagatcctgggagggtgcaaatgttttttttcttttccttgtgtttatcgtggtctggtgcagagtgtcccccagaaaacccttgtcgggttaacagagacagcctaagctttcacaactgcagtcatgatgttcctgtccttgtaccagccagctctctcttcccattagaattcctctcaggcttccctgccaccgcaaggctgtcatctgacttcctgtctcccagccaggtctactccctgccctgtggactgaattcttaaaattgctcctctgtacgggtgctgctgggtgggccgaggacagctgggctggcttgctctcagaggaagcagggcttctgtgttacacaggggtcctgactgagacttgaggggctgttcctgtgtgtggtgcattgtgggcacagcactccacccctttgggttccctgtgctacactgggcaggtcatctctaagctttggcctccttaaatgtataatggggtgatgttatcaggatcctcttggttgttgtgcagccttgacagagagtcaaggtcatctgtgtctgtgatagcttaagtgtgtgttgttttactgaactacactgcagttcctcaaggggctttgctcatgtgcagaccacgtttaacttttgagacagggctatgggaatgctgaaacggcacagaccaccatcctgtcgtcaagttacctactgtctcaagatctacaaatctctccctcgtcctctgaggtgtccccaccatgaatgcctaccctaggacagccagggacagtagggggtctctggggtcttaattcagttcacttggcttctgttctgccttctgactgacccactatgcgtactttaccaacggggcgattcacgagcagaggggtaaagcaggtgcccccaccccacttccatgggcttctttcctggattcaatcagtactctggagctgctcggactccttaccttactgcctcacccctgctccctccctgccccacccccgcccctgcagcccacccaaagcattttgacacaataaagctcaaatccctttgccctcatgtctagcgctgggacagagtctgaggtgatgggtccccacggagtgaggtagccacacggctatatactctcaacttctgtttcacaatagccagaggggttcacaccgggtgaacgtgcccacattacaaggtagcaatttctgggccttccatatggatgctaagtcaaaaacaagagcaatgcactgggcagttcctgcactggaggggtggccccaggccggaacttgagcagagccttccgaagctgaagacaccagtgggtagccaaggtggtggctgcccgcataaatgtgttttgaatcgcaaagacccctttggcttgcctagccacggaaacattttttaaaaagtgtcttattaagcccccaaatctttaaaataggttttagttaaaaatgaagcagttacctaattggcttcattagatccaattatgaaatcagggtagattaaaaagaatggaatcagaacatataatttcataattacaacagataacaataatgcaaaaacctaactggaaatggcactggagaaagcaatcgacaagtaaatctcagacaatttgaagtcttccatgaatccaaacatcccctgcccttgccggttactgctcacaaatatggtttagctaaacaagacctatttcaagttgcagactcagaaatcaatgttggaaagtcattagttctttttggctccttgtgtggctacagcaggtgagtgattagctttctttttgtctcatgagaaagatgaagccacccgtgatcacacattttcatgttcagcatgactggacttagaattgcccagaagacacacactgggtgtgcctatgagggcatttccagagggatttatctgggaaaggaagacccaccctgagtgtgagagtcaccacctcagggcaggaggttccagactgaatgcagagagaaagggggtgccagcacacgtgtttgccttcacttcctcccgattcctgcccccacatgcctattgctggtccctgaaccatggacgcaaacgaaccctccctctctcgagctgctcttcaagcattttatcacagcagtgggaaactaaaaaaactctctttctctggtcatagcagatagcttccagacaggacccattcttgaggctgagttaaactgaaagcctcacctattctcttccatgttccttgttcctcctgtgtgggatgggggagctgggctgcagcgtgccaggggcaggccacagtaaatgaaagcgctggtctgatggtgtggtgacagcaccctgtcaccttttggttttatagaaaggaaaagcctgctttcttgatgagaaattcaaatgtcaacctcttggagcagcttgatttggtgcatggttctacaaattatgtccagttgccagaaggctagaagagctagaaggaaattaatcactcattaattcactttttgttttacttattcattcagtgaatgttttaagcttcctcaaggaagcgataacttttgtttgtttgtttgtttgtttgtttgtttgttttgagacagggtttctctgtgtagctttggagcctatactggcactcactctggagaccaggctggcctcgaactcacagagatccgcctgtctctgcctcccgagagatgggattaaaggcgtgcgacaccaacacctggtggataacttcttatttagctgtaaacatcaaacttttagcatagtcccgagcatgttggggataacccgtgtctactgaattgcttctgacctatttcagatatcagttacccaggctgtgtgcagagcgaagagccagcaataccctactaaggccttcaataatattagtgtgtgtgtgtgaagagagactattgtgctaccaaaaaatatgaattaaactgtctttgtcaatactgcagacatcaggaagtagttgttaaaggttgaatgaacagaggtatgtagaggtgtaataatctgtcaggggtggcccctaaaagtcatggtcatggacagatagctaagggatcccagggacaaccaggatcagccatcccctgaatacacagggacctcctcttatgtgcagctctggtttggtgtgagccttttgtcaaattaagtagcaaatatcaccaaagcccccaatacatctccacagataacatgggtacctgagaatgtctccaagttgttggctaaaaatcttgtacactttctccaatgatctctgttctgtttgctgctccttagatgtcatctttgggatgacaggaaaagcaaacaggctttgtggtgctcgaagttttgccaggaaaaagccaggagctcctccgtgttcacctgcttctcccccccccccccccactttcctgggtgctcccttctcattctcattctcagttcccagtgacgccaatcctcttaccacaggcaaaagtttgctcgccaggagaaaacatgcacatttagcttggagatacaaacaccctctctaaccatctcccagactggtctgctctgtgctgattcaaatatccatgcactgtttagtaagaagcctgtttccagagttagggacactaatattttacaaagatttctgtcactggttggacacagaagcacaaacgtgctgtctgattctaaactccagaatgtggaattgtatgtgctaaaatctctgttggagaatcaggaccacacagccatacacccacaaagcctggagtgagaaagtttccgagttgggtgtgtaacatacaggcttttgctttgctggaatcagcaatcttccacctgaactgtcttatttgcatcaaacttgagctaatatgcctctcccttttctgctgattaaaataattcaggaaagaaacttggttctagagacatatagctaggacaagaacgagacttttcctgctagcctaaacttgtagactcttatctctcctgggcttttctggaaaagggctctgacataggtgggcagggcaggacctcaataagaactgtgacacttagacactcaaagggattgcctgataaaatgctgctcggatgtcaggtctgaagatggtttcatgtcttcactgtagttttctttgcaggaagagatttccatctcatggagcccagagctcacacctgacgcttcttgtggctgttaacttgacattttcagcccctggagcctcctgccttcttgtcctatttatctgtggtgtgtctgtctgccttcagtttcctaagcaggttcccagctgtgacttggcctctccccctctctttgcattgccttcctctgctcaccttgctagcctactggctcagatgctgtcccagtgagaactatgtaagtccctacacttgccaggaatggtggctgcacctatacacccgcattaggaagatgaaggctggataattgggagttccaggacaacctggattacacagcgacaagaccattaagagcaacaatgcaggcactgtaccaggcagtgctgtgtagtaacatctagccctgtcagtgaatttgtgttaatcaccacacccctttgggtgtggcttcaggtgtggacatgaccagaaggtagaggagtgcagcaggtcaggctccctggctggcatcggaaggaacaggaacacccactgttctttactcttatctgtgtaagttgttccccaataaaacacccatttatcatttatcttgggtctagtgaattcaccaatcccctgctttcagtgcggccatgaccctgaacatacacactcctgtctgtcagggagaacacagcagtctctccacattagttgagggtaagagatgggtccaggactcacctacaatccccaggaccctgcagcagagatgaggttcctcccatttcactgtccccaaaattcactattctcaatttccaatctcacttcagaccctggtctcttccccaaacggcttctcctcctgacagaggtcctatcccaatgacaccatctttctcgtctgcatgcctagcctaggttgttgtgccaggtttgtccagccctccttccccaccgtcacctctgtctcactcactgttaaatgccatcagtggtgctatcttttccttttcccagaagcttgcaccccacctcctgacaccatcccaggccacactgctctctgggcagtgaccttcagtggatttctgttgctagtgtcagctcagctcagacgctgacatgtactactcagaatttcaactgggctttttctgccatctctcagaaattcctccaagtgagtctcctacgagcagtgaaactgggccactaaggaggccctgagtatctgaccggcctcaattgtccattccattggatgggtcagcacctgagaggtcagtagggcaccatgtgggaatgacatgtgtgaagatgaggacctggctggagacaatcagaccaccatggctgcgacccagtgagtgatcgatccactggtgaacttgctatcacactgagctactgggaggtgaggcctcactggggaagggcatgtccctagagcctccatcttgcccttgccccttcccgttccggctccactctgcttcctatccaccaagttgtgggcatttctgcttcctgctggccattaggtgaagagtctcccgctgttgtgataccttgccttatactgggccctgaatgcagagctaggtggttgtgcgctgaacctgtggaaccatgagcaaaatgactctttcagtgccaggtaacagctcagtgggaaaagtgcttgctgtttgcaagagcagggactaggtttggatccttggcatggtagcatgtgtgcctgcaactccagtgctgggtaggggtgtggtggagataaatggatccttggagctcactgagcagccagtttagctgaaatggtaaactccagtgtcataattatgtttgctgtaataaggcaccatgacaaaggtaacttatagaagaaagagtttatttggcttatggttccagagggttagaggccatggcctttgtggtagagagcatggaagcaggcaggcatggagctggagccatagctaagagcttacatattgatccacaagcacaaggcagggagagctaaccgggaatgtcaaaggcttttgaaacctctaagccacccccagccagacacctcctccacaaggctatacctcccaatccttcacagacatttccaccaagtgcagatcaagtatgaaaatatacaagcctgtgggagtcactctcattcaaactatcacattgagatttgaagagcgactatctcagaacaaatataaggtagaaagtgataacgatagagacatatacatgatgtcaacttctggcttccacatatgtaggtgtatgcaggcacaactacaactccccacctcaagagtatgcgtgctaacacacacacacacacacacacacacacacacacacacacacctttcttcctttgaggcctgacaggtgtgtgtttgtcacactgaccatgaaagctaactaacacctctgaaggtctgagtgacttactgccagcctgtgtttggctgtttctcacaggaactcactctgatccagcagacaaacctcactgcacaagtcctgccttgtccattaccccccaggccacacagacaccctgacactcttttccacacggagcaccactctgactttcagcctctttggattctcatcacatgactgggcacacctggtatacccacttccagctggttgttcccccacaattgagttctacagaagggggcgtattctgtattcccagaaatattttatacaaaagacttgaggggagccagataaacacagttattccttttacagccgtgaggtcacattctgtaagttctgcatctcagatgcccttctcctgatgagcagctgggaaatgtttcccacaaacactgtccagaatgtgtggccacagccatgacagagtccctcaggggactcattacctttcccccacatttagaaaagaggagagagagataaatgtgagggacagacaaactactagattctgtccatctcaaaggaaggatgcagagaaagcagccataatcagaaatcaggaatgagaatgcctgaaagatgccaaggtacggaagctctttatacaaagtgttctggagacacacaagcacgtcaacactgtgtcaacccacactgttaataagacaatgcccagatggatggatgggtggatgaaggctggatggatggatggatgatggatgaatggatggatggatggatgggtaagcaggctgtggccagtactgtgtctttgtttatctaaataggtgacctgctccttcagggtcaggtcaaagccactttccttaccttactgactctccttaacccctcttcttagttccctctcctcaccttgatctcctcacctcactcccccacacaagtaccattcttaggactgaacagaagggtcagctgttctctaaaaccagaaagtggcattctcccaccaggctcccctagaacatccaaaaccccacacaagatgttttcaattattgattttggaaattcaaggactcttttgaagcatgacttttgtttgcatgtgacaatatgaaacttccagatttgagaactgagaggtccagtgatgactggaggtttggggccagaggttagagactttagtaggaaactcttcactacacagataatccctgaaaacatgttatctgttcactggagacacagatttgatggataacaaggatgatgtcagcaatgtcaaaattatccagtaactgacaagcctatgtaaagtctcacaaaaaagccagagctagaacatctctcacctaagaggaaggcaggggagagatggacactgaaggcctctgatacggtcacagttagagaatcaggactggctgaggcagccttactcaccgtgatcatctgagccacgtagctctcaggccctgtgtattctgtcgggtccttcaccttcaccaggacgatgaagtacaagtaatgccacatgttgtgctctgatttaatgtgttcttcaaaggagactgtcttgttgtcaaatttgtccctctccaggcctgcaaaacacaggaaacactatatgtaatttttctgttaatcatgacttcttcacataataaaaatgaccattattaaaaaatcaacaacaaacctgctttctggaagagtgtgcctctttaaaatactgttacaattagaaacaacaatacagaaaagctctagataaaagaggctgtggtttatagactcattcccaactaacatgtattttcctccccgtgatccttgggagtgtgcagttctattacagaggtcagaattgcaggtgatcttaaatgtagaccatataaaactatcaaactcaaccaggccaaaagcataagcggaaagagacaatgataattgttcaagaaaaggaaagcatttgccacagaagccaggtaatctgcatttgattactggagttcacagaaggtccagttcagcagagcacacctgtaaccctaacattcctactgcacggtgggaagcagagaccggagatatgcctggaagctcacaggcatcagaaacgcaagagagaccctgcctcaaaacaaggtggaaggcaagaagtgactccaaagttgtcctctgacccccacatgtatgtgctgtggcgctcacacaggctgatgctcgcgcacactcacacactcatacacactcacaggcacaataaggatttcagaaagaaaacaacaaataaaaggaatgctggctaattgtggcaggaataaaaaaagagattcctttccatcaaggccttgggttaaaggaaagcatctgagtcgtgccttcagtcacttgcaaccagagacagccctgagcacactgtgcaggggtaaggactctcctcagggcccctggtccatgacactcagggaagctggggcttgggtggccacttcaattctcaggtgtcctagtcagtggtattactactgtgatgaagcaccatggccaaaagtaagctggggagaagggttcatttggctcacacttccacaccagtcatcactgaagaagtcagggcaggaacctggaggcaggagctcattgatacagaggccatggagggtgctgcttactggcttgcttcttatggcttgctcagcctgctttcttgaagaccccaggactatcggcccagggatggcaccacccacaatgggctgggcctccctacttcagtcactaattaagaaaatgccctacagacttgcctacagccccatcttacggaggcatttccttaattgaggttccctcccctctgatgactctagcttgtgtcaaattgaaataaaactttacagcccaatcaatcccttgtcaacacaaaaacatcactgtaaagtcacaacctttcctttcttgttcatccccaagatcacacatttaatataaacatcacattgtaaaacattttacaaacttaaaagtcccacagccttacaaactcaaaaaacagttcctcctctttaaaagaccccaagtctcttttaaaatcaaaagtctctaaactgtgggtcctataaaataagaaaataagttaaataataaattcttacttcaagagggaagagtcagagcacagttaaaatcagagcaaagcaaaaccaagctccaacagcgtaaacaactcaacgttcaatgtctggattctttattatcttctgggctccttcaaggggcttgggtcgctcctccagcaccacacacacagctcatactctaagctgacccaggctccactccactgcggctgctgtccttgatggtcacctcatagcactggcatctccccaaaacacaaggccaggtctgtcacagcaacaccccaccatcctggcacaatttatgtcctgtttagtaaccctattgcttccatgaggcaccacgacgaggagcaaactggaaggaaagagtttgtttggcttacactcccaattcatagaccatcaatgaaggaagtcgaggcaggaacgcaagcagggctgggacctggagacaggagctgatgcttactggccttcttatgggaggatttgagtggtcaggcttttctcttcaagcgaggagcttatgaagacagtaaatggagaggaagagaaacatccatgggaaaacaactcttactggtgtgggagacgggatgtcagggttgagttcatctttgctgttcagatagtagaggagacgccaggaaactgagttcagtcctgactactccttccctgtgcactccacaggttgtccactgcggctgctgtccttgatggtcacctcatagcactggcacatttcaaaggtcatgaagaaacctttctttaagcatgttacaaaacaaatacatttaagaatatctgtccccagtgatgggttgacttttgaagttgttattggatttttttttatgaaaatgctgtataaaatacagccatctggtgatggtacctcatttcacttgaccaattatcagttcagcgtgtcggacatgagctccaatgtgttcccaccacagcctccctctggttatatagtggctactccagtgttgttgtccaagtcattatcccaggagtcatccttggcttttctctgcttctcacacgccatacccaatctacgttgaaattcctctatttcttccttcagcacatatccacatgtgtctgtctgtgttgaagggcctcctctgctgaggccgtgctctgagctattgccttccggtgtgtgtgtggatcatctcattatcggcccaggctgcctgtgtccacctgtgccctctactctcagcaggggagctggagtcactcctggaaaacctcacaatgtggaggctctgcttggctgtggccctcacagcagcccctcacaatagccggtagagagggcttacacagtattagataaaacacagatgttaagattgagacatccagtgacagctgaattccatatagatggtggagatagtgtgtgggggcgggcagggtatgggactcctactctggctctctctgacctactcacttgagacaggttctcatactgaagctggagacacactgacagctagcaactcagagttgctcatgtctccgtctccatgaggcaggggttaacaaccctgcctgtagcggtgccaggtgtttcatgtggatgctgagttctgaactcaggtctcaggcttgaaaccttggccactgaattctctctccagctccagaatttttgattggagtaagtgatgcctagggaataggttgggttgtgtccatgaggctgtttccagagacatccaactgagaggagaaaacctcctttgaatatgggagagaccatcccacaggccagacacaaaggactgcatcaggatggaagaaggcagctgagtgccagccttctgggttctgcttccttatctactaaggtgtgagtcagcagcccccctctgacacaggcaggacaggtccctgaaaatgtcctgcctgccatgaggtctattgtcttttctggagtagaagcccaagcaaacccctcctccttacataggagtatgccaggtgtccaattacagagaagaggaaactaaacacaaggtatagttatttagtctgtctgtgtctcatgtaacgtttaggtgctaactcccacgtggcctggctccactgctgctctgacctcacctcctcacctccccctgctggtgcataagcagccatgctggcctctgctattccacagaccgattcctccatcaggggccgaggctaggcatttcctctggccacagaactcattcgctgctgtgtccttggctaactcattcatgaatgtttctggtgaactctgattggcaggtgacttagggtgacacagtgtccccacacacacacagtccctccccattggtgacacagtgtcctgcacacacacagtccctccccattggtgacacagtgtcctgcacacacacagtcccttgtcatttcctggcactctgggccatctgtcactatgcctctcctttcctagttcaccactttctatcacactgacaatagcagtgtggaaattgctaaattacactggatcccaattcgactcataggtaacagagtagccatgccttcgagggagagcctgctgcgggccagcacggaggaagaaatgtgctcccccacgaatccgtgcacatacatctatactcactccttccttgtcttattctgtttttgagacagtgtctcattatttagccctggctggattggaacttgctatgtaaaaaaaaaaggctggcttcagtaataggatcttaatgcatcagtttcctgattgccgggcttataggcgtgtttgaccaagcctggcctaatatttattactcacatgctttcccgactacagatacctgtgcctctgctcttcaccatggccctaagactttacaactgtctgacacacagttgacattcaatgaaaccgagattggatgagttaagagcactcagtagtaaaatgtatttccactaaagttgaaagcagatgatgacagtgctgggagggtctggaaatactgggccctcaggctactaaaagaaatgtaaaacagggcagcagctttgcaaaacaagccatttctaaagaattctcacagtcaccgcatgacttgggagatcatgcccaggtgcccatgaagggagaatgtacgtacacacagcaccctgctcaaggatggtcactgcaacacagttcctgcaaccccaaagttgaaaaaaaaacccaatgcccacccgtgaggagcagaaagaagacttctgatatcggtctcagcatccgatagaacactctgctcaatagaaaggctggaagcacttacgtgaggtattacgcagcatgagggctaattttgattttcaatctgaattaataaaaaaaactgggggagctggaaagatatcttagtggttaagagcattcagggctcttgcagaggaccatatggcagcttccgacggcctgtacttccaggtccagtggatctgatgccctcttctggcctctgatgaccatatatatggttctcatatagggcacataaaccacacacacacacacacacacacacacacacacacacacgtgcgtgttgtggagttgcctccagggagagttaactgaggaaggaaggaacagcccgaatgtgagaggtgccatcctatgggctagagaactggaatgagtgaaggggggaggggaagcaggtgagcactgacattcaccttctcttctcagtctactgagatgtgagcacaacacctcccacagccaccatggactcccaggagctggcccactgccataccgtactgccacgagggactgtatctcctgaactgtgagcctaagggaacccttccccctgcatgttgctcagtcagatagtctgtcagccatggggaaagtgaccagcacagacaggagccttgcaagcatcaagctagtgataaagaccagatatcttaactgaatcttcaaaacaggaaaaggtacagatgcagagagcagatcagcggtcggccagggcacagggtgatgggaggctgctgagaacatgatggatgagtgttatgggaaggggcagtaaatatgtcctgaaatggatcataaagttgtgtgcccagttctgaatacgttaaaggcactgcactgtaggccttaagttggtgagttttaaggacatcacaatagagctattgattaaaaagaagagtattaaagtaagattccccagaattaaattcaagcctctcccctgtctgcaaagtaatagagtattaaagtactgattccatcatcactcaccctagaatgtggtagcgggaccaggtaacgtgcaatgctctgaagcagcttgtgtgggcaagggagcatagcggacaagatgacaaacggcttcgaggaggcagacagctttacagactctcagaagatgacttcagcaagcggaagagaggtacatgctcgtaaattctacctgggttttattgagcacctatttctgctggcgaccacaaagctgtctaaaaaccctaccatccgacatgacgtttatccacaccaagaaacagatccagaacggttcaagctaacccctgtagttaggtgaagaatcagtcagcattgaacagagccactcctgactctaaaggtccacatgggcgaaggcctcgaggtggcaaagctagagacgaatgtgggtggcctggtgtagaaaaggtcacccgtctactgtggtgctcaaactgaaatctatggcatttcccctttgtgctgtggactcgtgggtggaaacagcagcttcagaactatacttgaagtagttcttggggcagaactttgggggatggtaggggagactgatggagagggcaaggagccaggacaatggaggagaatggataagttgggggtcatgttgacttcatgctcataggctcttgctctctggagtgcggcattcacttccatatctagcagctggctagagaactccacagggctagctcctgggcttatccaacttagctcactgaaaagttgtttctctgcccccctttccacttctgataacaatcaggatgtcccatgggctggcacttgaagccactctcagactcctgtgctgacctcttcgtggacctttcttccaccctccaaattctccatgttctcagaaagactcttgtctccagctgcctctcttccaccttgcaggtgcttcttctccaagacccagctcagcctttggcgccaccggctcccacagacacaaccagatggatgatcccctgtctgcttagattttgaatgccccctacagattacccagacaaccacaggaattcaactaaacttgatggaagaactgaataaatgatggagaagactgaagaaacatttcagagtgaaaacccgagagggcataaaatctacttggactaggagaataagagaaatcaagagtgacttttattctctgccttgagtttctggtaacacccaccacagcacttctctttaccatggagctaacctgttatccaggcctctttgtgtgtgtgtgtgtgtgtgtgtgtgtgtgtgtgtgtgtgtgtgtgtgtggtgttggtgtatatacacacatgtgtgcagatgctcacaaaggccacaagaggcatgagagcactggagctggagctacaggtggttggaagccacccacatggatgctgggaaccaaagtctagtcttctacatgcttagcgtgtgttctttactgctgagacagctctctgtccccagtttacattattttcttttggtaaaaggaaatcaaacttggttcttcacatatggtgggcaaatgctcaactatagatccccagcccacattttttcaaagtttcaatttcatttcagatatgcacacaaatttgctctacttcacgatattctattgattataatacaaaaattttgtttagatttactctgagcttaggttaccaaacagcccctcagtcttttgaataagcatgaagcttccagaaaaatcaatatagacttgattgacatagcatcaccctgagcctctggatatgtcatccgtgccttggcgtgtcatgtcactgagacaataccaagtttgtggcaaaatttggagccatctatagtcagagccaggttttgtctgtgtactcgtgtgctacatacattcttatgtgcacacatgcatgtcgaggccagggggggatgttgagcattttctcaagcacttctcactttgcttgagtactacatggacagccagtgagcaccagtaagcctgccccacctcctaaagttcacaggctcacgttttcgatgtgagtgcgaacatctggatggccagcgtgccacaggctcacaccgccgtgcccagcttcccatgtgggtgtgaacgtctgagctcaggccttcatgcttgatggccagcacttcactgaactatctctccagtctgcatctaggttttgatatgaagtacagatcaactcagtattgatctttcttcccttccttgcgtacctgacgagcaatgtcatgttgatttactgtcattcattaacaaacactgatgaatgagcccgacatcaaacacgggagaataaaaacggttaatacgtctatgggtctacctctcctgaagaagcacagttagcttcacctctgcacaatagtagagaattttataaacaagatctcgattaccgctaccacagcctcaaagcctggctgcagactctcctcattccagagcagcaaagagaagctcagggaaagaaggttggccaaagctacatcatcaggccatgggactgtggaaggctgtgtctgcctgtctaagaggttcacatgctttctacagtatgagggtgcatgctgtcaagaagaagcaaacagatgtcactgagcatggcgtgatgacagccattcaggagcacccatgcttatcctgccgagtgagcctgcaaaagggttcatgaatcctagtattggggctgggcctcagagacagggtgagtgctatggctcacaggggtttggtatttcaaccagaacattcgctcactactgtgaatacagagtccaggatgagaacgacagggaatgcacttggactggatttgaaacataaactggataaaaatacactaaagaatgggaagaggaagggggaagaagaagagagagaagagggagaggaggagggagatgggtctagattgtaaagtgtcttattgccaggaaaattagaagtttacagcaatggatggcaccatgttactgagggcttttgtactaggaaagttagtctagcagcactgagccggcccatgtgtggctgtgagaatttgtgacaggatgtagtaagaacctgtggaggcagatctgtcagcccagggaggctgaagtgttggaaggagacagcagagatactgatgtgagggggagcttccagccctgctcaccgaaggcagagacacatgtctgtggctaccatatgccagccaggatctggagctgagcagaggaaggcagagaagagagggcactgggtttgggctgggtccacgtggctgccaggaggctgtgccagcttcagtctagtaaacatgaaatagaaaatgaagcctggggagtgtggtgctggtgatgtgtactcggcaaaagcgaggttacatgggtatgggagaaaagtgtagtgagacagtgtcggggatgggagaaaagtgtagtgagacagtgtcggggatggatgggagaaaagtgtagtgagacagtgtcggggatgggggtcaaggcaaaaatcaaaacctcttttctagagagctcttttctctagagagctagtataaaggaatgggacatcactgggagccaaagacacagacaaagaggactgtcctttggacggcaatattcaaacaatttactgtgaaaagtgaaaacagtgatgggtgtcccataaagaagagaaattagaggactttgattttgtttttctttctttcctccaaaatgcacgggtctagttctctcccaggatgaaagaagcattccttcaggtgtccagacgtgtttcttctccatacccctgagttgtcacaggacatctctttggctgtatcaccccaacctcattttccttcatccagttagacatggacaacagattgttatttggcctcagctctcttctagcaaatctgagctctgcactgagcagcctgctctgtaaaccaccaaagcatcccaagtgacaaaccgaagggcaaggttcttcccaagggacaaaccgaagggcaaggttcttcctaagtgacaaaccccagggcaaggttcttcccaagtgacaaaccaaaggacagggtcttcccaagtgacaaacctgaagggcaaggttcttcccaagtgacaaaccaaaggacagggtcttcccaagtgacaaaccaaaggacaagtgtcttcccaagtgacaaactgaagggcaaggttcttcccaagtgacaaaccaaaggacaagtgtcttcccaagtgacaaagccaaaggacaggatcttcccaaatgacaaaccaaaggacagggtcttcctaagtgacaaaccaaaggacagggtcttcccaagtgacaaaccaaaggacagggtcttcccaagtgacaaaccaaaggacagggtcttccattcatgttattggttttgtttgccttgctctggcatttggtcacaaattatacgtgtgtgtgtgtgtgtgtgtgtgtgtgtgtgtgtgtgtgtgtgtgtgtgcttacatatatgtacacatgcatagatgaatatgagaaagggggagggaggaagaagaagagaggcaatatcacgagccatgaagacacagaaacaatgcagatctcagagctcttgcttctcttcatgttgagtggcagaagcaagctctcttctagatgcttttgtcaacaattgtgccacctttataaagtgaagacttggggagtctgtcataatgcacaggacctgaggaacccctgaagcattttcatcttagctcacagacacatcattcttggcatcatgacaccaggctcaggagatcatcctccacctggatctgcccacagccacccaaagagggattcccacaaggttcttgtctttgcacggcttggctcgtccactccttttctggaattgctccaatctgggtcaccctccaggaggaacaccaaagggctgctcaggatatcaccatgtactgatgtggatccaggggccagaagtggcatgctgagccctccctgagacaggcccgctggcctcagcagcaacagcgcagcccaccatgctggagccagcagtgtggaatgtgcgcacacattctcagatgtctctgccgtgtcctccagtctcctcgcgaactttccacccatgttctctctctcctgacccttggtgggtgctgcttcctgcttacacaccacttgccccaccaagcagttgtccttcatgctccagattttgctgtaatctgtgggctgggggctgactgccactgtctacagactctcaagtcccgcacttccccgaggtaaattctgggtattcatgcctcacctccccatactcagcctctttgtatcacccatgcacccagtcatttctcatctcattcccaaacatcagcacttcaaagttctggagctggagagaaggctccatgattaagagcacttgctggtcttacagaggacctgggtctggttcccagcacctccatagtggctcacagttgcccacaactctggcctctggtgcacatacatatatacaagctaatcaggaatgtgcataaataaaaacaaatccacattttaaaaagattttaagattctgggctggagagatggctcagaggttaagagcactgactgctcttccagaggtcttgagttcaattcccagcaaccacatggtggctcacaaccatccgtcatgagatctggtgccctcttctggcctgcagggatacatgcagacagaatactgtatgcataataaataagtaaataaataaataaataaataaataaataaataaaaagattttaagattctatcacctaactttcttgactcggccttgcacccctaacactgcaccacaggctatcactgatcttccttacttgtcatctgggctgtggtactaaccagttactctgccttcaggtcaatcccctgatgaaggactccccagagctactgcaatgctctcaaacaaaagctagactcagagcttttccacctacagtaagactctgaggctcacaccgacaacaccttgtccctctgctatggtgtctgtaggaaagtcctacagcactaaggcacatgctttagtgctcagaacccagctggttaggggtctgagaacttggggaagtgggcctatctggaggaccaggcacgagtacagcaggccttgaggtgtgtagctcatctccatttcctgaccagctagcatgtaaacaagcagcctcacatccctacagccagagctgagaggtgctctcactgccgtccctgccctgtcatggtggtccaaaccttcaaaccagaacccgaatagacctctcatccagtaagctgcagtgtctggttacagcgacactcaaagcgagccccaggctgtgcccatactgtttctgtgccacctctggtcctggctgttctgctccacccacttcagcaactaactgatgccctttgtccctgatcaccacctctgtgccatgtgtccagggaaacatgttggctgttactgctccccgccctgactgcagaggtgtctgtcctcttagcaccttcagtaacccagaaaggtctctgttacttcccttgatacataagagatctgtgtgtgtgtgtgtgtgtgtgtgtgtgtgtgtgtgtgtctgtctgtctgtctgtctgtgcacacatcatgaatgctcaggcaggtcacagctgatggacattttccccagagcttgtgtattatcacgcattctttccaggcacacctccagctggaggaatgatgaaacagcttggaggagccaccaaggagaatgagacaagtgcgaaaagcctcggcaggcacagaacaggctgcacagaagcccagtttaagtcagatggtctgacactgtggtgaagaccaaaggacagcagaggggtaagtgtggcactggggttcagagtagagaccacggtggcaagtgaagccagagagggctgatggatagagaagggggagggtttgagagaagatgactgtgaagtgatgggggaagtgcttctgtgtatgtgtttgccttgccggatgataaataaaatactgtttggtcagtgaggcagcaacttacatgggactaggagtcgaagaggattctgggaagtgtagtaagaagtggtgatccaggcaggaagtgacatagcaaggagactcatatttgagcaaggagaaacagaaaggtcccttttctcctccgctnnnnnnnnnnnnnnnnnnnnnnnnnnnnnnnnnnnnnnnnnnnnnnnnnnnnnnnnnnnnnnnnnnnnnnnnnnnnnnnnnncttataaaatatatagatttatgataattaagactgagctaacagttgagaatcctagtcatcggccaagaagcatttgtacctaatacaagtctgtgtattattttgtccattcacacggcaggcagaacttaggtggctggcggagactgcccacatggcgatagaactcaggcagcttttggcagaaagatttatcataacagtgaagggaaagttggttcagtgtaagcaatgatgcagaagaaaagggtgtgtgtgtgcacacatgtgcagagtgtgtgtgtgtgtgtgtgtgtgtgtgtgtgtgtgtgtgtgcacatgtggagaatgtgtgtgtgtgtgtgtatgtgagtgagtgtgtgtgtgtgcgcgcgcacgcgcagcctgtggtatgttgcatgtgctgccggtgcatggggtatggcaggtgtatgatgtatgtgtatggggcatgttctatagcagttgtatggtctgtgatatacatattatgtatatgtatatagctttaacactgggacaatgcctggttttgaatctaagatagtgatgccaatgagtggaaacttgtgattcgtaatctagcaaaataaaaagtcactctgtaatacactcaatatgctattgtgattaaaaacgcatctgccagttggtggaacctcctggtatctggcagcagactctacagtcagaggactgtacaaattgcagaaataatggcaggggagtttgggggtgattcttgcatctatttatggaagcagagagtgtcagtctcacgtggcattacgtaacctgaatgttgtccagccttcacactaaaataatttcccctaaaacctgaaaactggaaatgattctcacccctccttcctgctaagcagtttgtcaatctgttatcttaagggtgatttacccatctctcgtcataacacagggtggaggggcacctaccgcagatgaagcaggttgtcttgagaatttcttccttcttctgcttctcacttctgaggtcagcaaaggtgtcaatgatcacaccgaagatcaggttaagaacgatgatgatgacaatgaagaagaagaggaggtcataaaccacccgggcggcgaacaagggctcctgcaacagaagtgtgaaacacacatggaatgcacactcacttcatggctgtcacgttagcacactgtctggcataaagcaagaggtgtcctctgagtgagcacaaacagtcgccctggttagagaagagaaacctctctctctgcccttattttccctccaaccaagggaatgcctgaagcctactctcagaattcctccatttctctggggctgacacattttcacccaacaggaaaacactttctcgtgtgtttcactagtgacagatgtgaaatgtctccacgggttcacaccatttgtccccatccagaggtactgtctgagtaggctgtgtggcctcaccacaggaggtgagctaccagggggtgggccttgaggccttggagaccagatcctgtccttgctcactctgcttcctgagggggggaagccacgtggccagctggcttcccagccttccaccactgtctctaactgaagttgcctctctcccaggatgatggaataaccccacagaactgtgagccaaaatgagcccatctttccttaatttgattttgctgggcaccttgtcacatcagtgagaaaaaactatcatgcaggtctctcccagacaccaagcaaaagggagtcaagcacaatcccagggccagctgagggaaacctggtgatttctcaacttctgcagtaggttctgtccttgttctgaagaggtcaagttacacacagctcatgaatacctgtgtggtctgcaatgttaaaactcaccccagagaccatgggatccggctgtttatattcgagctgagcttattagaaagatgactagatgttatctaacagaccagcagcagaagaaaacagtgtatgcttctagcctggtgattcaacatttacagttactgagaaatgctctcgctttgccgttttaatgtataaaattctgttagaacccatccatgcttcgcactcatcatggtaaataacagaggctcttcttccaaagcagaaacagagtgagtccttgctcctggggactctgtagacccccgtggcttgccgctggctgtgttctatttaacaatgggctcctatggagtttgtggccgtgatctggctgctgtgacaaaatgtgcagctcagactggagcccaactgacatccataggcttttagttcacctctgatcctgtgtgatttcactgtgcaattaactggtcttacagccaccctaacattttaaaagcaaatggcactgttgccctgaaaaaaaaaaaaaaatgtaagtcataccgtaaatactggtaaggaaggcaacaagaaagaagccaggcctgtgtgcatagggaggctgactcagggaggcagaggcagagcaacagcaacttcagggccagcctgggctacagagtgagtgagttcagggccagcctgggctacagagtgagtgagttcagggccagcctgggctacagagtgagtgagttcaaggccagcctgggctacagagtgagtgagttcagggccagcctgggctacagagtgagtgagttcagggccagcctgggctacagagtgagttcagggccagcctgggcaatgtagtgaagcgcctaatctcaaggtttaaaaactaaaaggagggctggagatatgttacgttgataggtttgattcccagttcaggaagggagggcgggaaacagggagtgaggggacatgaagggagggacagagagcaggaggaaataatctcggcttcttgaactaaaccctttccgtctgactcacatctttcgatggtcgtctcagcacatcccccaccccgccgccgttcctgaggccctggttcagcacggtgacgatgcacatgagcagggtgtcacatgtcctctcgattccatcgtcactcccttcgtcagctgcagagacacaagagagctttgagaacacactgtcatccacacccaagagtctgcttctactgtgcaaacacaatctttggaagtcacatgacatctacttcacacgtgaccacacgggactgacatgtgtagagctacacatataataccttgagattttgcatttctgggcttggtggggaatgacaggagagaaaggtaaagtgtgacaaggttaaaactcatgcgcctgactgtagtggagaatgtggtcaacacagctctccacctcccaagctgcaaagagttgcagatgaaggcgtcaggccaaggaagccatcgggattggggcaagtcactgatctcagcagcctcatagagaacgaggagaaggctgtgagttggagggttagccaaggaccatgtaaggcgtgttagaactgcccatagtaggagctttcgattacagtagccacaattctgtcattctgtctttatttggagtaagtttgagagttttttgagggaccacctgggtctagagatgaaatcctgcttagaaatgatctattgtgtcagaagcgtcctgagacttaaccccttgctgaaagatccagacagaaaacataaaaccatttaaagcaaggatggctgctcagctgggtatgagaaccaggattctgttacattactaaatgagcagaaaggccaaggctcattttgtcacaaagttaactgtccttggggacttggggctacagtctgcatgtcacggcaagaacgtaaaagcaaccacaggctgtggggcaggcaagtggtctcactgcatgattcagggccgtggatctctcgttaggagaaggctggcttctctcttctgaacagattttattttatatcctaaggaagagagaccctgatatttttacacgagtccaggttgctcctttgaaagcatggtggaataccgctggccggaaggctgcatgcagagacaggcacacacaagcccagcatcggagacaggcagaccgtgtgtagtcgctcaccatggagctgaaccagatttctgatttggaaatctgaaggaattgagggaggaaggagcaacggggaccggggacagctttgtggtggtgacagaaaaaggaaagacatgagagtgaaagaaatggttacagagaatctctgggttccaggaaggaggtcataggatgcagctactgccactttgcaaaagaagggctttcaatcagagcaaatgagtaacgagtttcgtgggacactggatacatgcacttgttaatcggtaactgcctggttgtagcatagcagatgccggctgaagacccacgtgtgccagttcggtgggcacgtggaagtggcagggaatgaagctgtctcaggagttagggaaatccacacatcacaccatgtgattagccacggtgaaataaataaaatgcactggctgccaagaagcatacgcaaaatgtcaccaccatgacgggccacaagagaaatacaaatcacaacgacactaaggtcccttctcacccatatcagagggctaccatcaagattccaaaacaaaacaaacacaaaaacaagaaacaaaaaatccaacaaccgttagtaagggcgtgtgtgtgtgtgtgtgtgtgtgtgtgtgtgtgtgtgtgtgtgtgtgtgtgtaggaatatgacccttacatacagctggtggacatgtgggaatgtgggccaatgcatggaaatgagcatggaagtccctcaaacaatcaaagcttgagccagtgcatgactcaactatgccatttctggctcagattccaaagactcaaagacagcccatcacagagaaacctgtggacaagccaaaggacagaaacattctgtatacatcacagatgaagggaccggcagagaaagaaaatgtggtttgtatatataacaggttcattcataaacaggaacagcattatgttatttgtaagaaaatggatggaaccagactcacaaagacaagaattgtgttttgtctgatatgtataacttagaagacatgaaagcccaaagggtagggaactattaggactgtgaaagtggggggaaggagatgggacccgagaaagggtaatggggattaaatatgctccaagttcgttaaataccaatatggaagtgtcataatgaagcctacgattatgcaattgacaagaactaagcaaagagttgtgacttggcagggttgcgtaagtttgtgaaatataaaaattgagtagcaggaggatgcccaagttatgtcagtgccagcattggcccatcatcttgctcaataggagctacaaacacaggcacactggggtctatgagcttattaaaagggtctactgtttgacatgactccactctcaataagtcattcagggctcccatagggaagtgccaccttgtggtcacttgtgagacaagcttatctgtacacaacacaggctttgtgtgaggaaaaggagacagaggtataagtgccccagcctactggaaccttatggtccccaagaggaaggcagtgggtcagcagatgagcaaacacacagcagcctaggtgtcctgaaggcagtggcctctgaataaatatcaaatgaagggcctggccagcacagtcgggcctagcagacattccctcaggtacaatgggatggcaggggcatacctgtgcatgcatgtgcgcgcgcgcgcgcgcgcgcgcgcacgcacgcacacacacacacacacacacacacagtgcttggtacatcataagggctcagtaaatacaagttatcaattacccacacacagtggctgttacatcttatgaaaaggccttgttttaatacaagaaacaaatctgacacttgagtgatgtgagcttatctatctgtcttaagctgaccatcagaaaaacatttttcttaatccatgatgattaaaagtttcatttgaggaaaggaataaaagacctatcccccaggttctgaagacattatttcacttggaatgttagtctatatattataaaaacattgaacactggctggggaaagtcagtggttaagagaacttgctggtcttccagaggaccagagttcagttcctatcactcatgtggggtggctcacaacacctgtaactctagccccaggggatccaatgccctcttctggcttggcatatactcacacaaacacaaaatacataaataaaaaatacatcttaaaaatactggacatgctcgaacgtaagtatttattgatgtcccctttttatgctttattagttaaattacttgctgtttgtggacacagcagcccggagctgagattcacttggaaatctgatggcaactcaaatcctctcgtcttaaactttagtgactctaatccaatcattagagaaatgctgttcttaaattttttttgtaattaggaaaatgttttaaaagactgatacccaatgggaatccaaaatgtagcatgtgttaccttgacaagctctgctatccaccaaccatttctattaaaggaggataccaggagattaaaattggtctcttaaatgcttaaacacatgtgaactttttattctcctgaatgtgcaaatggcattgactcacagagtagccatgattagacttttaatattgtcttaacaaagcttggcttttctggaaaagtcacttttggtggggatttaggtattttcacctgaggttctagcaggcttgaagtaaatgaaatacaaacattttggagtgtttttcaagttgaatttgttgcaagttgtcaggtgaatcctcggctgatggaaaaatgaccaaatctgcatctccaggagtcttcccagggccaactgtgcctgccagccattgcctggcttttacacaggtgccgtgtgcctgggtattctgtgatgtgcacctgctggccccaagagagcagaccaaggccctcaaaaatgctcaccacagctcacgagttagaactgcaccccagccctagacagggaaaagctatttttaagcctaagtgacatgtgttgcacaacaaatgccagacttcagctttctctctacttacgtggctaaacacacagagacatcatttaaagaagcacagaagatcaaactcataggcttgccaatcaaataactgtagctgcacacattctgccaaaagttagagcaaataaggccctgaagataagacctacacattttaattactgaaattatccacataggcaaaatgtataggtcaaatccactaggggtgttggtggcacacgcctttaattccagcactcaggaggcagaagcaggtggatttcggtgagttcaaggccagtctgatctacatatcgagttttcataactccagggctaaatagtgacagcctactgtaaaaaattaaaacttcaattataaaaataaaagtcaaatccatagacttcccaaattctaatcaaatcaattttaacacttgaacgtcaaatgcacgatggctctgctgtggcttctcagtgtctctaggtatggctgtgagaaaaccttcaccgggaaagctgccctaccctcaaagctgccctaccctcaccccagctccggaacagctctgccagccctctcctctactgtggcagctttctctacaagattcccacacactgctaccagctctgttgtaccccaaaggacagagactggggggggggagcactgcacaggggtgaagaacagtccctatttgtccttaggaaaaggagagacatctgtagtcagggacttaagatggagacagactctgaaaactgctgacaagtgactttatgctaacagaagatgctcaagtgggtccttgacaggatgctgtcggggggagcagggatggcacaagccgtccttatactggggatgagcaggcactgtgccccacgaccggggggggggggggggggctttcccaaagannnnnnnnnnnnnnnnnnnnnnnnnnnnnnnnnnnnnnnnnnnnnnnnnnnnnnnnnnnnnnnnnnnnnnnnnnnnnnnnnnnnnnnnnnnnnnnntctctctctctctctgtgtgtgtgggtgtgtgtgtgtgtgtgtgtgtgtgtgtgagcatgcgtgtgtgagatagagagggaaattaactgatagggtgcatgtacatgcccatgaatgtggcagccagaggtcaacctttgttgcctttctcaattgctcctagctagactggctggccattgagccctggggatcctcctgtcctctcctccccagttttgagattacaagtgcaatgcccagctgtgtgtgtgtgtgtgtgtgtgtgtgtgtgtgtgtgtgttatctgtgtgtgtgtgtgtgtgtgatgtgtgttatcatgtatgtgtctgtgtgtgtgatgtgtgtgtgatgtgtgtgtgatgtgtgtgtctgtgtgtgtttggagtgtgtctgtttgtgtttggagtatgtctgtgtgtgtttggagtgtgtctgtgagtgtgtgtctgtgtgtatatgtgtgtgtgtgtgtgtctgtgagtgtgtgtgtgtgtgtgagtatgtgtctatgagtgtgtgtgtgtgtgtgtgtgtgtgtgtgtgtgtgtgtgtgtgtgtgtctgtgagtgtgtgtatgtgtcctgggaatccaactcataacctctcacttatacagtaaatacttcactgattgagacacccacccagtcccatttgtgacaaatttctaggtagctgaagaatttcataaagcatctgagagtgtttccaggccctgaaattcctttgtaacattcctagatctcctgtggaagtatctagagcagtggttggattctgttttaatctgtgaggatccagatgaaacttctcagggtctctgggccacgcccattttgtatggtaaatctttctctaataagttagaaacggcagaaccattcttaggtcaagagccatgcaaggccaagtggcacgtcaggtcacatgaattagggaaagggagggcagtgaaacctggaagccaggtcaatagcgtgagatgagcttgagagacagctcaggggttaaggccacacactgctgttgcagaggatctgagtcgtctcccaccacactctcactctcggcagagagttcacagctgcctgtaactccaggtcaagggggcgtgacactctctggcccctgtaggtgcttatacacacataccattaaaagaaataaaaagaaatcttaaaaagagcatgtatgacgtgacttagagaggtctcgccacccacagtgagagcagcttgagtaggagtttgaagtccagaacctcctctgagatctgtggggaagcctgagaaataggaggtgtttaaaccaacagacacatgtaatatgactgtagagagtggacgcttggtgatgccttgtaagccgagaagacctggctcttgtgtgagttttgactgggggtcaggcaaaccttgctgggaacatctcaagtgcccacactgttggacactgcctgggataaatacaagcgcttgattctctctctaggtcacaaagtggagatttagtcagggagggggccatctgtgccctcccaccaacagtccaacatctcaagaaaacaaggtaacttgacgctccttccttccactgtctttcatgtcacttccttcatctgctctgagttcattttgccatttaatggactccaagcttccttagctatgacagctccagagtgacacaaagatctagagtccacaaggggtgggggtggctcccgggtagagcacttgcataacatgaatgtggccctgcgctcaccacacacactcacacacacacacacacacacacacacacacacacacactcacactcacacacacactcacacacactcacctacacacacacactctcactcacacactctcactcacacacacacacacacacacattctcacacacacacacacacacacactcactcacacacacacattctcacacacactcacctacacacacacacacacacacaatccgtcgtatttactgctttatgaaatacaccactattttttctataatttagaaaacatcatacatgccatattcccagactgctgtcacatcttaagggaatggtttagagctaaagctatttttagacatctgcttgctcccgaaagggggagagggattttgttcattcatttttctgtccttataagctatccaaacatggttctggaagcctgtgtaccgtaagccagcaaagtggcaaggccaggtttacagccaggtctctagagtagaacccctgctttcccacaccccttgttggcagccaagtagccagaagcggatcctttagtgtgggctgctgtttgggagcagcacatttccacatgctgaatctgccaggtttgggtaagcagaaacactgtgagaaccaagacagctcagaataacaagtgcggaatcctttctctagcttgaattatttcggtcctttaccttttgttctctgtttcaacacattatgaagtgccaagatccactctccttagaggggctagtacagacctgggttgtcagtacacacctgcgtcggaagaggggatcgtgggtgaacagttctccttctgacaggtccccatcatggaaggtagggtcatggtgggagccccgtgattacctgggagaacacagagcagagaactgtagagaggcaggtactatatgacagacagacaaccacagaggcatccgagtttaaagatatttgtgctttgaccacgctgcatcctaaagccttttggtgagttagcctggagctctgagcacacgtttgtttgcctgttttaaagcaatgttacagaggacagattagtcaccaatgtgcaaaaagctccaatcatctaattgttttcttttaggggctgtgataaagtactaatgatattgttgacctaagccaccatgaatactgctatttctctagccacatgcattcagggttctgacttgggctgctaggacagcttcctcccaacgcaggctcaagtcactggtccctgtggctgaaacaaggaccttgggtaggcagtcctcacaatgaggtaagggactcagagaataaaggcttcaaatagccggaggatagaagactttttttcagaaccatgtttgggaactaactttccttccccgagcccccaggaacccctctttctgctggcttcccactggtttccctggcccacatggtgcagagataataatctttgcacttgtatgaagcaaagttgaacctgaaagtttgactcatagctgagaggaccaaaagaagtagatttacaaatggggagctgatattgggaagagatgtgaagagtgggtgggctggggaggcccaggtggccacacgggtgctgtgacagctttgggaaggagtgtcacggagacggagttctgagtgaaccccgatgacagtcagtactcaacgtgtcacactgggctcccatggctcagactccaggctttggagaactgacgggaatcaagaggcagaggcgtaacgggagctgatggacgagtaaaggaaaggttaacacaaagtagcagagtaggagagaggagggagatggatcctagacaggaaaggaagtacctacttggggaaggatttccctgaaggaaccccgggcttatgaacatagatatgaagcagggagcccaggtgcaatcaccaaggtgcaatctataatatcaaaggggagcagagggcagagcaggctgagccatgcaaacccccagcccagaactttctaccaagcacccaacggatggttcagatccttagaatcagagctttggctggaacagtggagggaggccttaggttataaagccacaagggcaacctctgcactctgggtagatgcgaatgaggagtgggcaggtacgagaaacaccgtctacttgtcaggaggaccttccttcctagtacttcccaatggcactgctctgcccaggcctgtgtggctgcttcctatccactaagcagcagatcttggggccagaggtggcatccacattctcagaaatctccaatgatgcctgcaaggcatgtgtctcccgccctccccagcactcccaggccctgcccatcgagctctgactttccaactccccacttgctcccatctgtggggtttctgattgcttcacacctgcttgaagaactgcatccaatgtcactcactacctgagtgtgttagcctcaatgatttcacccatggtcagctttgtgagtgacagtgctcaaaacgaaaagaataaagacgacatgcactgagaccctgctgtaggccagatacttccgccaaggctcacactgaacctggctgtgaagtactgagaggtgatgagacatggcgtctctctcctcggggttggattaacgcgcaccatggattactggttatctctatagtggattcattttaaagcctggtctgcctctcctcgtggtggggtaccctatgttgttatctttcacaaaaacagcctcttcagacatcaagcagattcctccagcaggaaccatgaactaaatgaacctctattctttataaactaccatgtcttaagtaatctgttgtggcaacggaaagcagacttaaggtagtgtagttgtctccacattcggcactttcatagtatttacaaaagtttgtgtgtgtgtgagggagtgagagggggggaagggagagaaggagagagagagagagactggctcctacacattttcagtaaagacagagcttgaaatttcagctttaacatttcttacgttgtatttttttctatttctaaagaaagtgcattcataatttagcaccaacttcctccccaaacaacagaaaatatttaccacagaactcagaaaacagtaattaccgtgtaggtttgttctggaagctttagcgcttcttctgtctctgtctcacgtgttctcaatactgaatgaactgtggccaggcctctaatctagccagtgattataactccaggctctctgatctcagtttagaaagagtggagcactgggggactgatagaaaggcctttccttcttcacacacctgaaccctgctgggatgggcttcatcttcagtgtccgtctagggctatacactgagtgtctggtcaccagctcaggagtttatctgatcttttgggaggcctagtgacggcggggtcactggggatgcaccgttgaagcgatattgagaaccacccccaccccaccccaccccccacctgaaagccaacaccgggtaagaatctttgcctaaccacagagatctgtctagttctgccttgccataggcctaagtgacattaactgaaaacaaaagctgccaaaataaatcatttccttgtgttgaaattattttcttgggcctttttttattattattattattattattattattattattattattataacagtgaatggaaagctgctggcaatgcctgtggaaactctagaaaacgcacctgaagtaacaacaacacatcccacggtcctgaacgtgcagacagatatttggtgtggagttgaagtccccggtgaagccggtgtttctgtcacgtgtgtgagtcatgggactcactgatgaatggatctaaacaccgtttcctcgtcccataagcttatggaaggccttactatgcattgtcaattccatagttatgaactatctgtcacccctgtgggtgtgtggggttcccgtgggggtctcacctgacctctaaaagcaccttctagtcagctcttcccacatttttcccctccacctcatgccaggttgccttgcccagcctaaacacaaggggaggtgcttcgtcttagggcaacttgatctgccatgctttgtcgatacccacgggaggcctgcccctttctgaacagaaacggggaggagtgggtgggagagaggaaataggggaggggatgggagaagaggagggaggggaaactggtccagactattaaataaataaataaataaataaataaataaataaataaatggaatttagaaagaattatctgttaaaggcaagaaaggatattgcatatgtctccactaattaaagtgctttaaagtctgtggtttaaggagaaagcacgtcttttggggatttcctgtctctataaacagtagttagtggaaccaagaaaacagcacatcacagaaccgtggtttctacagagtaaagcagggttgggggaaaggttaactaaggaatttaacccagcaaagggtgtgtactagaggtgagaaagcaaacagagtagataagaagtctaaaataataggctagctcctcatgccggggcttctcagagagaacacgaggtgatgtccaagtgtccagtggcaaacatcatgcggggccccagcagtcactcgccgaggagtggggtcttttagccacagcctctaagcacgtcttccaaaacacacttctccctccctaatggtttccaaatcgcatttatcattttaaacacaaagcaatgcatgtggaaaatggctgagtggtggctctcgggtgctggatactgttctttggggaaatgggaagaagaggcaaaaagaaagaatttaggaattccccacagtgaagccgctgctgcctcctgcaatatggtcagcattaggaaaccctgtaggatggagtgcagatgtgtatttcccaacccacactgacagcatacaggctgcagtattgcaaatgctcaactcctagaagttccattattactttaatcattgctaggatcaaatacctaacagcgagcaaattgaggaaggaatgaacagtttattttggctaatggttcaaagagatacagcccgacctggcggcagccaaggcagctggtcacactgtgttagctgtcaggaggcagagggcagacaggaagtaaggccagactgtccaacccaaggctcaccacttcctccaaagaggctccaccagctgaaacagtgccaccacatagggaccagatgttcaaacgcacggggctaggaggacatttcacccttaaaccacagcactggtaaacaagaccacatcttaaaagggtgaaaataaaatttttacctatttcagtgtgtctgaaatcccacaaacaaggtgtgtacaagtcagaactgttagggggagcttggagggtggagtggctacctgggactggtgtttttattttcagtctgtccacttccatggtgaagtcatccttcaggaaaaggaagccaatgatggagaacaggtagaccaggatgagagccaagaccgcggtcaggatgatggagcggccattgcgnnnnnnnnnnnnnnnnnnnnnnnnnnnnnnnngcagggtctcttctctgtacaccaaatcaaagagctacagagacaaaaattaaaaaatagccttcaaacaaacaaacatttttaaatgaacgcaaacagttgatccagaacacaaggaggcacagtttcaatgaaggaggctctagcagcatccacgagcatcagctggcttcgtcaacagtgtcacaccgcttgctaagacacaccgccattgaatttagggcatttaaaatatcaggcacatgtggcttatggacatttgaaaaagtcattaaatttatcgttcaattgagggactcaaaacgaaatgaggagaacaattttgtgagcctggtgacatagaaaaatgtttgaatttaaaatatttgggaaatgcaggtactcttcgttattaaaataacatgtaaatgaggataaaaaatctgtgttagcttatccttttgcaagtagaaccacaaaaaaaaaaaaaaacaatggtaactgttttgtcaattccttctctctaaagggttactgtggtgatatcttacttgaacaaataaagcctgtctgggagtcagagagtgtagcttgccactagctaaccatagaggtctggaggtctgtacagacagacagaaagtgaggtagctgcatggaaacaggatataagcagggagaaacaggaactcactctctggtcttctgagacgctaaagaggtaaggtgtggcggtggcttgttccttctctgtgatctctcagcatttctctctatatctgactctggctttttattatttagaccaattaagaactctatttgcaggttactatccactctgtctttaatagcaggaaatctaaacacgaattgagagctcaagcacatgtctgctgcctgcagccaatgctgggaaccgttttacacattgctgcattataaagctgaaattatgaattagcgagtgcatgttttattatacagaggcacttaaaagaaataaaattatattcattttcagaaatgtccaaaaatgtttggaaatgaatccgatcttcaaacctggagacttggggtttgtgttcttatctggggataagaactacaatctagctggcctggaacaatctgtcaggtgtgtgtgtcctttgaaaatcccctggtctgctgtgtgcgagagttacaccattaatttccactgtaatcaatcacagccttgataatcactgctatgcagaacctgtctttaagacactggcatttgatgtgtcaaattcttaaaaaaaaaaaaaaatcactaccttgttatctttttatctcttgggaagtacagctattgttagaaacaaagtcaatattcttcaataaagatgaattaatgcaaactcaacctctagattgtcaatgttctggtttcttcaactttttcaccactctggttcacataaaggaggttttattttaactcatcagaggccagagtaggtggcattcataatgatgaaatgagaaactctgcctcaaacaaggtgaggggcacactcaaatatcgctcacagattcaagcttaccatgtttttacaccaactcctttcctccattcatgactataaaacagtgtaaacagagaaaggaaaatggcatttaagaacgagaggcatctttaagaaggatgtacagttgtgtgtaggcacacaggcacctccccagcacagaggctgaggtgggaaactgtgagttagaggccagcctgggcaacacagcgaagcaagtcatcttagaattaaaaaaaaaaaaaaaaaaaaaaaaaaaaaaaaaaaaacgcggggggggggggtgcaggggaggggaaactgtctaaagatttaaatatacatagataagcttagcccagatgacataagctaacaatggtaatgggagctaaatcataaactaatgatgatgacctaagctaatctatactttaaacagcttgctcttttgctaggatggcttttgttccttctcattttgcttacatactaccgtaatgactaatgtaactttgacattatagataagatatacatccttatttgtccctttgcatctggataatcagtgaattaaggaaatattacttggctgaaaacccaaagcctgggccaagagaagagtcaaggaagtttcttacttctcagcaaagaatagaattccatcacctatgtacttcccagagaaaagaccccacacacacacttctcctaggaaataccaaaaataacataatttgtgccctgctaaaaaacaaataaataaaacaaacaacaataaaccaaaccaaaagaaaccaactgggagtctaaggtgtacggtgctgcatcccgtgcccagcggcaattgtccctatggctgtactcaccaggaagctgtagaagaactcgtggacaaagaggccgagcatgcaaaccaggacgtacgccacatggtagagaaaggccatgtccaggatgaccgctcgataacctcgggtgaatgtgcctcgatttcccacaaaactcaccaggaacacgattttattacatagctaaacggaggagaaagtgggattttagtgcttcacagtatccgcagaacaagacaccgaaagaggagtattcctaagttgtggtttccgttctcagagccctcctgggttgtttttcaagcagtctgccaatgcacatgtgaacaacacagaactggctcactctgtagctacagggacagagaatgagaccctagctctgtcaccaacatggatgagtgtaaatctggcttttccttactcttggacaacctagttctttccatgggaagccttgatggtttctgaaaacctgctgtgaggaggttttacctcacagaagcccagatgacatgacatggccagagcaattactacaatgactcttcaaatgttccttagatacttatgactgtgtatttatatgtatgcctttaggaaaataggacgctctttgcaacactgattatgtatatcatacacacacatgtattacatacatatacacacacatacatgttatcaaacttgagagaatacaaactcttttccaccgacatcctgaagtctgaatccatacagataaaatgaaaaactggtaattattgcatgttatgaaggtctagtcagaacaacaacacagccactaaaggcagactctttcctccatgtccccaactagctgtccaccctctcaataaccagtaataatctcaaaccccttccacccactttcaacaacttcagcagctgtcaatcaagcaggagccttatttcactgttaggcggtttatgttgtcactcagtagcactgagacacgacggagacttcagagtggctctctaagagcaggaaagaaaactgctcaaaacccaagcaatgaatacacacaaaggtcctgtgtctggccacaagctggatgcacaacaagggtgagatgaatgtctggcaaagcaacatccagccgttattctgaattgcttttgagaaaccctgtccaaaattacaaaacttaccaacttacctggacttgcccacccaggttcatcgatgtgatagagagagggatttatacaaaagtagaataaagaccccctcacaagggtaattgtatgacacagacatatgctttctgtgtcatttcctcattttctacgatgagttacaaaaaacacacagggaaactgtttatgaagcagatatactggggaggaacagactaaactgaattctcaaaatgatcaataaattttggttacaaagtgtaaaagacaagatgcatttctgcctgagcagggctcggtcatgttaacgtgaaaaataaagagagatttgctttgcttgtttacccgggtggcgctgcacgacccttgacctgtatgtaacggggtgcatatgcttctgttctctagggcagtagttctcaaccttcctaacgttgcaacacttgaatacagttccttatgttgtggggacccccaaacataaaattactttccttgctacttcatagctataattttgctactgtactgttatgagcaaatgtaaatatctgatatacaggatattgtgacccctgtgaaaaggccagtcgacccccaaaggggttgtgaccctcaggctgagaactgttgttctagagacatctggaagtggaatgaggttgacgggtgtggtggctttgccatgggttcacacagagttcagaggcggaagcggtccttgtgtttaaggagtttatgccaaggacaaatgaatgcaagaataaagggcaggaaagaactgagagtccagtttctgtggcatgaagaaatttgtaaaatttttttgtgtgtggcactttccatgagagctgggacttggtggaggaataaagagccgagatcaccttcttcctgcttgtgtcatgacttcattgacatggagccggtctttctatgtcggcctcatgaggatgctgcagccaatcagttctgtggcaagcatccccgtgggcgatgcgtgatggtgggctgaggtggctacagggccctgctcttctgagctgctggaagcagtcctgaaacagcagcacagatgccaacagcaccacacattttgtttcactttttctatttattcctcaaagttgcccacagtgtcactttggtggatgacttgagtaatagtgaagaaggaagggtggagaaacagctccacacagttctctgggtctcacagaaatcagcatgctaaccaaccagtttaccaagagctccccttgtcacagcaagggtgacattaatgtttgcttatgagttagtgtctagtgaagaataagtattgattgcatcctggtgaatcacacggcagtgtgatatcttcatgtatgctcacaagtggtagacatgtctttgcaggactttcagtggtgtgatgtggtgaagtgaaagacagaagtcactgacttcattcttgacacatccctctgtttctagaggactttgttcacgtctataatatgtgcctagaaggtaatcgttactcagaatttatcttgttatttatttatatgaatgtgtgtgtcacccatgtgtgtgcagtaccttttggggcaggtgaggacgagccatttgagatggttttgagctatctgactttggtgctgggagctgacctgggtcttcagaaaaacaaaaacagcaaatgttcttaacactgagccttatctccagccccagactgaagccattaaagacgcctcctggccccataatttttgtgacatctttttgttattttatatggtcacagaaactgaccactgctaagtgttggcgatagtgttattcctttggtcttattcaggactctcttcctgagaagaatatgtaatcctcatttgtgctattactatgggaaaacatgacctattttccaagaataaattgtcaagtggaaaaacaacagacagtctgctgatggaaggtaaaacataagatgatttaattcaatgatctccaggtatgtgggttacacctcaggcaggataaaatcttaaggtcactatgtaaataaaaatttacacacagtcaaataccaccctgggaatctttgaaactgccagcagaacagtataataaacacagacgatgtgagcagcatcacttatgacacccaacacaacctcagagaggctttggttttttacaactgaaaggcagaaatagtggtacccggtgaccatattaaacaaaacaccgtgtgtgtatttgaaagagagagataatatgaagggaaagtttcagatcatgaactgaacttgtgtgtttagtgactgtatgacaggacacaatcctatagactaacgtgtcatgtggtcacccatgaaactacacacacaccgctcagaacaccattcgttcagctgagcctgtgggaactgtcaatagtctggctcgataccaaagccttatttgcttttccctcttgcaaagtggggagaacacactctaccgtgtcacgttaaaataacggtaagaaaggctagcaccactaagtgaatcacaggtccccagccattattagaagggggtaaagtgcggttatttgaatagatatagcccccacaggctcacagggcatggaggagtggccatgttggagtaggtgtggctttgttgggggaggtatgtcactaagggggtttgctttgaggtctcaaatgctcaagccaggtctagtgtgacattcactctcagctacttcttcagccccatgtctccctgcacgccaccaggcttcctgccatgatgataatggactaaacctctgaactgtaagccagcccccaattaaatgttttcctttataagagctgccatggtcatggtgtctcttcacagcaataaaatcctaactaagacaacagtgtaagtagatctctctagaaaatgttaaaaggtatttcactgtggggattggagtgtggctcagtggtagagcacttgcctagtatgtgtgaggctcggggttcagttcctagcatcagaaggaaaatctttactgataatttactatgcttttctttactacaaataatctaagccacacagataaatggagtgattaatgaggatataacagccatctaatgaatcagtaatctccttaaaaacaggaaatactacatctgtataaatgaggtttgcaaaaatattcagtgatgtgaacaacattaagcatttatagaatgtgcctctgtattgttcagaatgttaatttgtaccaacattagctaaagaggccacactgtgcacgagaagaaaactgtgtaagatatactttgcagcactcaaaattactgagttttctgagacaactgtgacaggaaaatctacctgaaatgtggacaaacttcaaactttacaaacgaattcgattttagcataataaactagaaactgataaattctgaggtattccttctattatatttcctttcttgtaaaagagacttttcatatttgcttaacattatgaaggacagagtctacagacaagttactgtatgcgctaagacacagacacatcatatggcaacactttctgattgattcattaatgatctgcacaggggatacttggtaaatggtagatgttatcaccagtgtatcaatataacagttactgttcttttctggatcttccataccaagattctcaacagatctcagcatccagatgagggtagaccagttgtccataccttactccaactgacaagaaggatgaaatcagacattggctgatttatatctgatgtctcaaatcctgcctcttgttatggctaaactgtcaggctaatgttttcttctggtttttctgatatctattatttcagcaatgacagcttctcattgctatacaatgcaaatgtctatgtacaaattaaattaattaacatattaattcatattattattaatatgtagttaataccaaggtacattagtataggattcatgttttactttatttttcctgtcccattagtaaagataaactaagaaacttgtgtaacgaatttatgtgaagagaaagtatatagtaattcactaaaataattttattattcttttggtagcaaacacaactttaaattataaatataaacttttctattaacatctgaagtagtatcaaattataataatttcattaaatttgcctcaaatcgacatagattattttctttagtcagatgaccctaggctggtggtagtgtcttgttgagtaacatgttttatgctattggaatactggaaaattcatggaattagcaatacagacatgtctacatgcataatactttctcgtgaagcagttaaaaaaaaaaacttggctttggtagagaattttttttatggtgagatgattttcaccaaagcacatggaagttatcactttatagtgtcctacaagagacaggaaaagaacaccagatgtttttggttcacgcccaccccaaacattcaaatgttttccttacctctgtctacatcgtcttggtccagagatttaaaaggaaacagaaagaaagagacagaaagtggcacataaattctagatggcaagctgcacattgcctacctcttggtgctctaaatgcccatcatattacataacaggtgcagagaatgtttgttattttgggggacaactctgcttagctattcttcactttcttaaacttggatttttctcatttagtcaatgatcagtttatgaataacatctgattcctcaaataatacaatttcatgctgaacatgttttctagagacacaaaatgagcccaacacagaggtatagacacgtttatacactttgtgatgatcctataattaccttggttgatgatttgacaacgtcagcttattttcaaagcaaagacaaaacgaactcagatcacggaatcgcctctgaatgttcagatgtcaaagacagggtggagtgagccagaaggaatgaattgcatcgccccattgagacaggggagaacaagggccagatcacacaggaacatggagatggggctgagcaaggaccaggttcatgcattaatgtgatatctaagccctaagaaacccagagaagggggcatctggtaactttcaaaagcctctgctcacactttacttcactgatggaaactgaaaattttctttttttttttaatattctaacaactgggaactgtggaatgctgtccaacattgaagagttgtaataaaatcaaggtcagaaacactgaaaacatagaagtgactatatattgtctcatcttggcaatctttaaaagttggttagctcatttattttcaatacatagtggccacagatccatccacttgctcattagctacttattccaaaatatttatagactccctgtgatgtcccaggatttcatgatcaatcactatccttaataagtatgtaaggtaatataggagataacaccagagtactgaacattgagttaggaacctgacaatagttacaggcagtgctttcagaattaattatgtagctacaatagcatttatgtgatttctgaccatttgttatttcatcagtttgatgatttaccttttcttcatatccatttacagatattccttgcctgaaattggcccagagtccattcaagttttttgtttgtttgtttgttttgtttaaattacatctacaaatctttcatttgcttcttggcatgatacttccagtttgttcattccacacttaaaactaacattgtcaaaagcattttcttgttctaatatactaaagtttggcgaaaagaatctcacccaggccttttataagtttataggattttctcatataaaaggagcccaattttggacctcattttttgcctagcacacttttctcccccaaacaagccatttgataggaggtatttcttaaattctattgaacataattcaatcttttgggatgacttagaacccactttcagttgttaacagtagctgggctatttttttcagtaatggcagatatggtactgggaggacattaaacctgatgaaagggacagccgaactgggtcacactgtaagggctacttaaacctatcgatgtgttactcatctttttgttctctctctctctctctctctctctctctctctctctctctctctctctctaaattaaagcaagtaaaaatgatactttagttaacataaatttatatcaaaccagaattcactgcatacacataaataaaagcatagttaaccatatttacactcaatacatctgaattccataagatacaaagttaagcaatgtacttacattagcagcaccaagaagtattagtgttggccccagaccgatggtgtatattgatctgagcatgatagacacaagaaatggccggatacccacaggcttggagaagaaaaacagcatagatgtgcagatcgctactgctatccaaaggagaaccgagaacaacggggaaagcgtacctggaaaaaggagcaggggttacttgtcaccaagaaaacacagatagaaaacaccaaagttttggcttctgtgcttcatatgcaaacaaagccatggtgcacaaatctcagaataacccagtcaactttctaccacaggaaagctttcttgactagtaagtttcagtgtcattgaggagctggaggtcccaacaagaaagtccaagagcagtcaccattcttcacttcgagtctgagaactctactttctctcttgcgggagtgatttatgaaatacttttgataaatgtacttcacttgggaacttcaagtcaaattgatgattgatgattgtgggaaatcaggtatagtccttcatcattcccttgttgtattagaatcaaattatcccattatggagtcctcaaaagaatctagttcaggccagcaagatggctcagcagatgaaggttctagctgccaggctcaatgacttgggtttgatccccagaaaccacacagcagaggaagagagccaactctcacctccacacagacacatacacaggaaagagacagcagaataaataacaaatgtaaaaaaacaaaaataaaagaacccagtttatagaaccttacattttatgaaatagagatatgctttgggtgttaaaacccacacacatgtgactatatctgagaaagctttaagtgttaaaacacacgcacatgtatttttatattttaaaacacctgagtcttcatatgagtgtaggaatatgaatggacacacttgaagactgactcaagttccaacaatatttaatcatcaggaaatatggagctgggtggatagccagccagggaagagcttgcctcatgagcatgaggatgtggatttgatctccagacccccaggaattaagcctaacatttggatggtggtgctaaggctgcagtgacaggcagagccctgggacttgctggccagtctagcgggatgggtgacttccaggccattgagggaccttgtctcaaaatacaaggtgagtgatgtcctgacctctgccttccacagacacgcacacactcacctatatacatatatacccatgcacaaaaatgcgtgtgtgcctgcacacacatgcacacatgcagtcatgcacacgcatgcacacatgcagtcatgcacacacacatattcatgcaatcatgcatgtatacatatgcacacacacacatgcacatatgtatgtgcacatacacaacatatatatgcagtcatgcacacacatgcagtcatgcacatatgcacacacagtcatgcacacacacacatgcacacatgtatgtgcacatacacaacatacatatgcagtcatgcacatatacaacatacatatgcagtcatgcactcacatgcagtcatgcacatatgcacacacatgcaatcatgcatatatacacatacacacacagtcatgcacacacatagtcatgcagtcgtgcacatatgcacacacacatgaagtcatgcacacaaacatgaaatcatgcacatacacacatattcatgcaatcatgcatatatacacatgcacacacacagtcatgcacacacacgcatgcacacatgcatgtgcacatacacaacatacatatgcagtcgtgcacatatataacatacatatgcagtcatgcacacacatgcaatcatgcacatatacacatgcacacatgcagtcatgcacatacacatgcacacatgcagtcatgcacacacacacacacagtcatgcacatatacacatacacacatgcagtcatgcacatacacatgcacacatgcagtcatgcacatacacacacaggcacactcacacatgcagtcatgcacacatacacacacatgcatgcacaatgcagtcttgcacacacatgaagctatacacacatgcagtcatgtacacagacacacatatatgcactcatgcacacacacatagaagcataagaaaaatctccaatgatttttaaataaacttaaaaaaaacaagttccttagaaatttctcacaaaggaggttttaaaattttccctcgaaaaagaagtgcaattctgtcatgtgtacggatgagacaatcgatgacagtccttctcaagcgtggcgtgtgctgcatctgcagaaggaactttaggcaccacgttattgcctccactgaagggtaccaggactcaagaagaaaacaacaaactggagatttctccccagcctcctgtgccaaaaccccatacgggtgctcattctttcagccacttctttctaccctaaaactgacttctgacacaaaacaccttgagtgctttcatgagaaaagctttggatccgcatcaaaaccctgaggtgacccagacacatcctttaataaatgttgtattcactgggggccaatgcattgaaacattacaaagatttttgtaatttgtcaaacatttcaactaccatcaaacaatccatgaaaaaacaaaaacactaatttagatcctgtgcttggatcctggctctgcatcatgttctctactgtggtttaggtacggtgtgtgctgtgactgtttccccagaggctccagacttcaagcatggtccttgtgaaatatgactaaggcaatggagtctttagatgtggtacctgcagcaggaaaccggattacagagctctgtctttggaagggattggcattgtcggggttggggggggcagcaccagacactcccgtgagagcatgatgcaaagtgcagcccccctgctcacctggccccttctccacacagccacatcccttgcagcttccccataaaattgtgatggaaccaaggagggtccccacctggactggacagatgatgacacccaatcatggacttccagcatccaaaaccgggaattatataaatgtttgccttatgaaacacccagaatcaggtgttttattgtagcaacacttttgttgccataacagcttccaaacaaacagtgatggagccatagagctggctcagagattaagagcacttgctgctcttccagaggacctgggttcaattcccaacaatccaatagaggctcacaactgtctgcaactctagtcctaggggatccgacacccccttctggactccacaggcaccaactatgtacacggtacatggacatatgtgcagacagaacacccacacatgttaactaaataagattttaagcgattttttaaagattgggaagaaagcgctcaccgtcctcattgtcagaatggacagcctccttttgatattggcttatatatgtgctctgcctagcaaaagcaagcccagccaccatctgccttgattcgacagctctcccagagcagtacagggtgagtgcctttaatgtccgactacatgtgtgttgactctcaggtctccatgaaaacacaaactctataagggtgcaaggtagtcttatcctgccacagtgtgtcttgcagcagtaaataatactggtctatcaagcagacaaaatatgctcagggagttcatactgagcaagccactaaatatttattaatccccagctgcacctggctttctacatgggctctggacatccacagtcaggtcttcaggcttgtgtggctgtcactctgctggccaaaccatttcctaagtccctggctttcttcttttaaaaattattttattctatttaacatgtgttctgtgtatgtgcacaagcgcgtgtgtgtgcaagagtgtgcatggtgtgtgtgtgtgtatgtgtgtgtgtagatgcccacagaggccagaagaggatcctaaatcccttggagctggagtcataggcatttgtgtaccaccctatgtgagtgctaagacccaaactctgctcagacaacagagcaaatcatgctaagatgtttctctagcatcccccagcttttcttttaagaatgcattaaaattgacatcttcagggaacatttgacagtgttcttcctatcatgtgactcgtcagactaactcataaataaagtctggtatgatattctgtgatttggcacaaatgctcattctgcaaactatcaccagtgccagatgatctaaccacacctttactctgtcccagatgtttgcggcccgctgggttctccccttgatatacaaaaaggcacaactatgcacttaaaactgggtggtttatccatttttacaagtaacttgtggactgtctagcacaggaccttgcacacagcttgctattgagtacatctgtgtggaatgagaaaataagatcaacagtcatttaatgcagttaattaaggatgaattctgtggccatctgtgagaaccatcaggttagttctgacctgaggatttatgccttggaaaaaaataaatctctctgacacacctagagacaggtgctaagatttttcaaagccaatctcagtggagtatggtgacttatgcctgtatccaaacacttaggaagttcaaggctggcctacactacatagtgaattctaggccaacctgggcgactcagagagatctcgtctctcaaacaaacaaataaccaaaaccaaagcaataccaagcagcagtgccaatccttacccaccaagtggaaactctttnnnnnnnnnnnnnnnnnnnnnnnnnnnnnnnnnnnnnnnnnnnnnnnnnnnnnnnnnnnnnnnnnnnnnnnnnttcccttaatattttgcatatttctattaattttccataataagtcttattatatttaatgggaagatatttttaggaatttattctttctaagatgttagaagctggtcctctataaaagaaaattcagacagtaaaattggacttcatttccacacttgtcttggagccctgcctcgggctgatttgttcatggcctcctgccaaacacagctgcttctcactcctcagccttctccaagtctgggctttctgtgcaggctcattagactccttcttcctacacccaggtccaataaagtcaacatctatctataaacccactggtggtccttgctctcgtgtctttctcatttcttggtccttaaccagaccatgagatccttgaggacaaaacagctttactaatctcagcatctctcagcctagcatggtgcgtagtacacaatggtacccataaatgcttatggaacccagtggattgaaatcacctggaagaatcttattttcctaagcaaaaatgtttgtgaggaagaattacacttaatatgtgaagaaaaatcctccctctagatttaaaattgataattctatcttgggataaaaagttctccactgactagtcttctaggaagggtcagttggcatggctggagatggccctagcatcaacagattccacataattcctggcagttaagagggagttccatctacagtggaggtagatggtgccttggagtgtttatctgagaggcaacatctcccttggatccctttgtgccatcattgtgaatggaggacactattttctaaactgacattgtaacccacctgtgaacaagacagttgagctcaagacacttccaagagcctgggtgacacctcaccattcattggaactggaggaagaccagcccatgcctctgctggccccttgccatgacggctctgtggctctcaagccgcttgtagtagggcccagggtgggaaagtgtggcccatgttaacagaggtccatctctggcccaaattttccagacggcttcatgattgccctccctgccccaaatgatgatactataggaatacgtagaaccttgtttctattttttaaattttataccaaagttccttaagacttaagcaatagctgcaagaataatggaaaaaccgccatgaagacccttcatctagatccaaatatcagtacattgcatgactgataaccatgaatgtcaacaccaggaacaatactgtcatctacttcatccctctgtctttagtttgaacagctcctaatctttgtctttgataagcttgagatagtgattgtgccaacctcaatctagactttaaccttattcctaaagttgttgtgagataattcacccaaactaatcatccaactcaggctcatgacagggtcctatgctcccccaattctcatgcttgccctccttctaaacagccacacactcatatcctacaactgaggatccatcttgctactactgctgactcagaaatccttttcaagagagatgtgtgaatctgtgtgcaggcaccaggctccacaaagcctggagatctgtgctttgcagcctcgcatttgttaggtctgcttcatttagaggctgaagggctcccctgggctttccttgtgtagtcagtcaaatggtgttagatgatttccagatatgcttccatcttaaagattccctgcctctctttcctggaactctgtcctgcatcctcagtggtccgaatgcaggtgatatgaatttatcattttatggtggggctttacctctcaagagtcgtgcccctctgtgtcaagatctcatcaccagagaagcccagacccaggggagagaaggctgttcccacttccacctgtgtggtgcacaaacgacatttttgctgccttgcttctgctgacatggtagacggacacatgcctgctgcctatttcctgctctgcagtcacacacatgctctactgtctgagatccccaatctccgatgtgctttctgtaacccccctgctcccccagctctacttatgcagctcaacctgcagccaagacagagacattgacaccggtgggacctgatgtagagactgggaaacaggaagttgatcttgggctccaatctcttctcttcactcccgtccatctgaaatttgcttacatatctgttgctgttatggcaccctctcccccgtgtcccctgggatggcagtgacaatatttaccttgtaacaactactccttgccaaactgtcaggacatcattctacgtgctctgttgacagcatctcattaacctaacaccccacgagcagatgtgctctgaggacgctctcaggttattatttgctgatttctctcatctctgtctccaacccattctactctcccaagtgtaccccacacctgtaacagatttttttccaaagcaatctgtcaaacctaaacaaaatgtttctgaaagtcccacctggtttctatggaatttcccccttctttgcctttgtaaaagctcatgcattactaatttaataacactgatttaatagtcaacatccttccttgtccatcattacagtctgtcttatgctgtgtattcaaaagactaagattatgaatattataaatgcacactggtatagaatcaaaacccttagacaagacagaaagtaagatgtaattgttgctatctcatcaaaatgcttggatgtaagattctcacataactgagataaaacattataaaacactaattaggttgaaacacaatcatgccatttcatttttcaatacttagccctaatagctatgctacatatgagctttctatataacgacatttctaccagccacagttttctgtctactctacttaatatctctgtgcttgcaataaatacagaaaaaaattaacacaaactaagcttctttattttaaatctgcaaagagttagtgaatgtaatttgggaattttcaggcagtcattatttgcagaaatgcaagcacttgccttcatcgccatcatccccgaaagggtagaagagagccacagccaggttgatgaacacagccaggttgaaggagacgctcccccagagggagatgtgcctggagaaccagaacagggcggggttgtctaggaagcaacaagtacaagggtgagaatggtcagttattgctgcggtcgacgggagccccactaagctaacggtgtgtgcaacgtgcctgtgaacagtcacagacgtgcatctgaagtgattgtgtctaatcttaggaagcttactgtgagactctagatggcaaaggcatttcctagttggttccttttctgtccttcaagagtgtcagcgaaggtgattctgcagtaaaaaccccttgcatctggcccgtgcagattaaggggaaggcagctagttggtctggggaccttttactgaagggcacaggcacatatgtgctgtaagtaatactgatgggtaaactggtcttattcttatggtgtgaagtcataaaagccaggactgcagacttggatggtccccccactggaaatgctcagtcagttaccttaaagcctgagtctcatcgctgcagcacagcatggatgggagctagagaaatgtaacctactcaagccagcgtggtttctcaggcttgaagtctcagcatctgaggagctgaggcagaaggctgggtattagtttgaaagaaaacgggaatttctagaaaagggaatacatgtctgtcatcagaaatgagctgatgaatgaatctactaaacagtgcttgccagaaactctgttctttccacttctaaataactgagcaaatatatagggcaggaggggggtgttggaggagctaaactgtcagcctactctgggcacctagcggctcctctgggtcttgtctattattcaacttgtaactaggtaacaattgcctgtaacccagacccatgggctatgacaccctcttctggctcctgcaggcactagacacatgtgggcacaagcctacaaaaggcacatacatatatacataattaaaaattaggattaaaaccttcaagataaaatgtcagagtcagtgggatgaggcatataaaatgaaaaccacttttgggatctagagcaaaccccagtctgggccattgactaacaaactgtctcctcctgagatcagctcatttttctcgtcttggagagggtgttccacagtgagaggggctgtggcagaatgctgtccccctgggcaacagatcatggcctgtagacatcaacaccactgtcattcctctgtttctatcagcccacaaaaacatttagattctgcctctacctttgttctatactctgcttctagaatttaaaatacaatgtccactaggaattattttaaggtttatttttttattaaaaaatacttgtcataaaacagagtcccagtttcttactaaattaactttgaattaatttgagcttgctattcaattaattttacatgaagaaaaattattttttcaaatatctcaaataaaaattttgaataatccacatatatattaggtgctccaatctttttttgctgagttctatgtggcaagattctaaagagaaacagtgttgtagaaaactaaagctgcatgacattatcttatacccaacagagcctctgaccagttctggtcatactcctaatctctctcagtaaagagcggagaaaactgaatggtggagaatggataacacacatgcccacctgtctgggaaagtctccaaagacaatgaagatctaatctcaagaggactgaccgcccctcctcaacttctgttattttagaaaacaacttaaaaagatttttcaaatgaaggctttaattttatgtgcatatgagtgttgccttgtggaccatgtgtgcacttggtgccctggaggctagaagaggatgccagaaccctgaaactggagttatggataattatgagctgccacgtaggtgcaaggaatagaacccaggtcctctgaaagaacaatacatgctcttaacttctaggccatctccacagcctcaagaaaatgatttaaaaattaaaattaaaaaaaattcaaactcagtgttttcaaatacataggagagttatgttacaggttaggttgcaaagagagagctgcgtggcgatggctttgactgcaatatcacttgactctctctgactacagctgtttggaaatgtttcgcttggtggatttagatgggggtgggaggtagaagaaagaatgactcctggaaaaactcttaagtaatacttgagaggtggaggcaggaacatcacgtacttagtcatctatggctgcatagtgaatttgaggactcactgagctgtgagaccctgtctaaacacatacagagttacagatggagaggaagagaggggaggggaaaccggggggggggggggcccccagagggagatgtgcctggagaaccagaacagggcggggttgtctaggaagcaacaagtacaagggtgagaatggtcagttattgctgcggtcgacgggagccccactaagctaacggtgtgtgcaacgtgcctgtgaacagtcacagacgtgcatctgaagtgattgtgtctaatcttaggaagcttactgtgagactctagatggcaaaggcatttcctagttggttccttttctgtccttcaagagtgtcagcgaaggtgattctgccacacatacactgagtgttgagggcaaggagtcagtgcaggatttcacatctgcagccatccggcagtgcaacaatgcagctgcagccttgcagttcataatacattaacaagcatgctcagaagctgcaggccatctcattaacctgggatttctgcgtccactgagctgcagaccgctcagcttcagtgacaggagggctgacacgctccaccctgcaagtgatctcggggacattaaacacgcctctgcacacgctccaccctgcaagtgatctcggggacgttaaacacgcctcttcattcagactcacttctgatcttcttctgccatttcatctcgttgtagaggtcctctgtttgctggaagaagtcattcaccttgcttccctgctcgtctctctccgtggtgttgaacactcggtacttggattcccgggtgaggaactcgcagatgttggggacagggaagacaatctgctccatagtcctgtcgtgccgcacaatctggaaacgagtttcatttgttttcagccatttgcacacctcagccctggactccacttttaacttcccttttcttgattgccacgtttagttctttgacaagtccatgcaagcatgtaatacgtacatttcagttaccatcaccgccattccctcattccccgaggcctgcttcttccctgtagaactctttcctgttctccttacttcctggttttggttggttgcccccatagattttgactaggaccatccgtgtggcttccaattctgaactacccagaagcgccgagtggggtcacctagtggatgtacagctgggtgccaagctttccttagttctcactgtcaacttgacacaactctgagtcatttggaaggaggctctgttgaggaagcccctcgatctggttggtctgtgggcatctttattattgattgatataggaggatcaagcccaccatgccagcgccatccccaggcctgtggtcctggaatgtgtcagaacactagctaagcataagcccaggtgagccagcattctttacagtgtctagctcaggttaccatggtaatgtctcccatgcagttataaaccaaagaaatcctttcctccccaggttggttttggcaagactgtttttatcatgggaacagacatgaaactagaacaatgagtttatgaatgatatttttatgaatccaattatgaaaaaggtaaaccagctgggtgaccttgaacctagtacgtaagcatttgtgtcctgttcttcctaagaggggctctgggaaacagatgatattagcattgtgggtcctgagttctctatacacagagaggtatctttatttatcattaaagtgttgtcccacctacagtttggtgttttgaatgagaaatgtccctcatgggcttatgtgtgtgaactcttgctccccagttggtggcacagtttggggagaccatggaacctttaggaggtgcagccgtgctggagaagtgtgtcactgggggtggatttgagagtttatattcttgctttctcttccattaccctcctgcataggaataaaatatgaccagtcagcttcacgcccctgccatagtgctgtgcctaccctgacttatggactcttcctctggaaccttaagccaaaaataaaatctcccttctctaagttggttttgatcctggaactggaggtgtgggtagttgtgagctgccccgtgggtgccgggaccagaatacaggcctctgccacagcagccagagctctcaactcctggatcacctctccagcccctttatatgctaacttaaaaaggttagaatatcaattgtacaaactacttagatatatttggtatgataggcaaccatgtgaaaagaaagttaagagtgtcaagtattttaaaaaagaaattcttagggcttactaaagaaaataagctttgattagataagccaaaatattcagtccctgcataaaatgacatgtttagttctggttgtcacattttacaaagggcaatgacaaaccagagaaactgctgaaggaaatgcattaaccgaagaaagccaaatatggttaatttttcccccgattatttaatgaatgctcactcagtcattagctagcagcactatggtactgaaagtgaagaaaacaagataatccccaagggctgaggagacagcttgctggttaaaagcacttgccatgaaaatatgagggccagagctcagatctccacagacccactaagccttggctgggtgtgccagcgccctgtcattccagccatggaaggaagagccaggggatcctcagagcaagctgtttagaagaggagccgtgttagcaggctctgggttcagatggcagagcccgcctcagtgagtaaggtggaagaataatagcagagtatgattcttgatatcagcctgggcctctcctgtgcaaacgaacatgaccacacacatatgcaaaagcatgcaaacacacacacacacacacacacacacacacacacacacacacgcacacacatatgcaaaagcatgcaagcacacacacgcacacgcacacacacacgcacacacatatgcaaaagcatgcaaacacacacacacacacacgtacacacacatatgcaaaagcatgcaaacacacacacacacacacacacacacacacacacacacacgcacacgcacacgcacacgcacacccctaacaccctgaagggagcaaacactgggaaattgggagtggtggataactacaatggtctagtgtgagctctccacagatacatgaaatctttccaatgaccgactgattaaaactggacgtgctttctgctgaagcagagagactcgtgggaggggctgacagtgaggtttggattatgggggattctttctcggatggtgattaggcctaacccttcccacttcccagagttattaaactgatcacaccaagctatcgttctcattaacacatgggtcagtgtagcagccaaatctgatgcaagctgtggctctgttgctgttcacacacagagcagaagggcaacctttggcatgaagtgatattgcttattaacgctcagagagttgtcaaaaataagcaataagacatagaaatcacccaccatagagcaaacggtgctggtgatagatcctgctaaaaactaaaacccatctaccagaatgagtaaatgcgctgttttgaacctggaatgacaaggtggccaccattctacctgcttctgtcggattagttctgcccagaagcatcaaaatgataacccagctagaagtgacacctcctgatctgccaccagacagtagatgatgtctcgtttatggggcagggagagggtagctgtcagacaatcaaagtgtaaacagctgactaccttgagtgtgtgacaccaacatgaaaattctattagtgctgccggtgttttctgtatacttttattttgcttttttttttttttttttttttttttttttttttttttnnnnnnnnnnnnnnnnnnnnnnnnnaagcaaggtctctctgtgtagctctggctgacctggaatttgctaaaccagactggtctggagctcacagagatctgcctgcctctgtctcctacgtgctgggagtaaagacaggtgccaccatgatctccatataagaagttcccacaatttttaaggaacagattctctagtaattatgttgtctctaaagtgtcactggtctgccctgactgcttctgtgacccaaacgagagaaaaaaaatttagtctccatttcaaaaacttcagccatgggggatgtccggtctgcatgctattaatatatgtttctcttattggttgatgaataaaacacagattggccagtagccaggcaggaagtataggtggaactatcagatgaggagaattctggagagaggactcagagagacgccaccagagagatgccatgtagctactgggaagataggatgccgggcattctccagtaagccaagagcacgtggaaatacttaggttaacagaaatgggttaataattaagagagagaaaatcagtaagaagcctgagccatcagccaaacagtttataattaaaataagcctcagtgtgtttatttggggctaaatggctgtggggccaggctgaacaaaaaacactccatctatacttcagactagttctggggagagaaaagactttgcaagatggacattcagtttccacatgtgactcttaggcatcggcctgcgagacagtcttttccacttaaatcatcaaatattatttcacagttctgagaaaaatcatggaaatggccttagctagtaagcaaatagatttttctaaaagtcacgagtaagtacctcaatctgtgcagtgtggttggcgtaatacttcaaggcttcgtccccttcttcgggatcagatcctggtttgagcatctgctgaagcagtttattgtgtcgggccaactgcaggaaaaagaattaaagggttaacgtctctgcacccttctcttgggataagactttgaagttcctctgtccattcgtgtgtgtgtgtgtgtgtgtgtgtgtgtgtgtgtgtgtctttcatagtcctgggttggcagtaattagccacattctaggaaggttatggctacacttgagaagcataagaatcggtcattcagctgggcggtggtggcgcacgcctttaatcccagcacttgggaggcagaagcaggaagatctctgtgagttcaaggccagcctggtctacagagagagtgccaggatagccagagtaaaccctgtcttgaaaaaagaaaaaggaatcagtgctcacatttgctggataacaaatgtgcggttgtaccgcagagaagaaatgttgacggcagcattgggaagatgaaattcctttaaattacacatgtatgtaaattactgtgaccagcagggcagcgggctgtagaaacaacacaaaggctacgctgctgtagacacataaagcgggctctctacccagatggctctctctcacctcgtggagctcagccctacaatagcagttcttcctaacctgtacttctgcacaggaccaggtcaaatctggcgctttatgggcacagatttcgattacactgtatttgaaactgggcattaaaaacccaacaatctaatgataaataatttcttctcgtgtacatatgtgtgcatgtgtgtggaggtcaaaggtgaacatcaggtggacctctatcattcttctccatcttatttgtgaagacagggtctctcggtaagtgtagagctcaccaagtaggcagcctgttatccgtgggagaactaggattacggcagccacgtgctgtgtgcccagtgtattgtgagcactggtgtctgaactctgcttctcacgcactctagccgagcattccccaccctgtctgtaagtcactgcaaactgctttcggtcagccagtggaagtgatctttttcatctgaacaccgaaggcatttgttgggtatttctctcactttgtagataattaatacacattcccttggagtatctttttcatagatgacttgaataactcctgaaaccttgcaatctccttgagctctcaagtgcaaatgttctatttctgccctgagttccccaggggactcctagggggtatcactgtgtcacaccaacccactaaccctggcggagtctgtctcccacctgcaagcttttaggtacaagatctcattagatcctactcagaaatcctggagtagacacttgcatcacttccattttacagatgaagaaactgaggcacagggagtgtgaacttgcctacaatcacacagttagaaactggcaaaagcaattagtactgacctcagacagttcagttccagagtcagtattttgttggtgttacaaggctgtaaacatatcatcctgttttccatgaagtcttaatataaatgggaccataaggaatcaatacagattcaagcaataatccagacctataaaaccaagtcaacaccctggaaagtgacagtttgatcaattaaatattcattccactgactccagaacaaatcatttttgaaatgattatttttagaattgccttttaggatcatgatgtcttgttttacttacattttatattcaactaaatgtgaattatatagatttttatgaccatccagagtcatgaaacttgctgcgacttgtaggtgttcctcaaagttagaatcactggggcgtactaacaactggcaagaattgggcagttccagggggtggaactgacatgacttacaaactgggatcaggaatgggaggaagaagaggtaaggacctgttatggcttcaaacttaggagtcctcccacagcttatgctgaaggctggagactccatgggaaggtgaggtgaccttaaggggggggcatacaggagggagtcgggtcattgggatgagcccttggtcccagcctctcctttcttcctctgccctgctgcccagatggtgtggtggacggctctgttctaccaccatctctcccatcctcttcaaggccacaatgttgtgcattaaagccacaaccacaaaacttggaaaccatgcactaaaataagccttctctcctcataagctgttcgcctcagctgttatgtcatggcattgaagatctgcttagtgtgagtccagaacgaatgagtggaagattaggaacgctgagtgctattggcaacacagcaatacattgaggaagaaggtcaaaacttggaaacccagagcttctagtgtcatgtaacacaaaaaataaatggcccagagactgatagaggggttcaaacgtctagcagaagatgagaaaagcaaagcagctggccactagcttctaacctctacctcaggctgaaagggctgatcctgttttcagagctgtcaccaagcctcagactgtaacctctcctcagcatggctggagactaaatgcctcctgctgaccactgaagtccctgcttctatcttttatacccttctagtgctgggattaaaggcgtgtgatctgttactcttttacactgattcaatctcttgtatccctgggtagccttgaactcagagatctgtctacctgagtcccaggattaaaggtgtgtgctaccacctcctagcttctggctgggggttaaaggtgtgttcctggcttctatggctcgtggctgtctttgctttctgaatcctcaggcaagctttaataaaccatacacaatatatcaccacagtgtcaccataaaggagaccaagaaacaggttgtagcatcagtttgtcaaagctcttggtagaggtcaggcctgcaacaacaaccannnnnnnnnnnnnnnaggaatgcaaaaataaagacacagaggccattgccttgggataggctcttccctggcaccaacagagcaggtttaaccacaccacacagaagttccaagtcaccaagcctatttaagtagtccaacaggtcaccagagagctcacgggacaagttctctccagagctggtgccagtcagcattaacaataaagttctctaagtttcagtccgaaccaaaaatgagccttaagtaacgtcacatcaatcaatcagctatttctctgcccccaccttccactctgtttccttctgtgagtcagaccactctctccctttacttgactcttcacaacccttaatccattatagtctatttctaggctcggttcccagcacccactgggcagctcacaaccacctgtaactccagtcctaggacatgcagcaccctctgctggccacttcaagaactgcgtgcactgggtgcacaggtaccagagccagcacaatatccacacataaaaattttaaagtaaaaactgtaaatgtaacactaaatgtatatgtatgtatatcataaaatgcacctatatgtataacacaaaccttatacacaaacatacataatcaccaacagtgtcttatacaccatcatatatttttaaaataaaaaactgggaaatgaagaccgaccacaaagtcccaaactccactaacaatgaatacagcttgaaaaaatgcttgttcatatctatctccctatcactaggatttcaatgttgatttaatatggccccaagtaaggactggacaataacaagaaaagccagcgactgtgccagaatgctgttctatggtaattataccttgatacttctatctaaggtttttttttttcagtgtatgttcaactattattaattggtaaaactgacagggagttggttttccccgtttgaagatccccaagtcacatgactgcctttgtgtttaggtcaataagtgaacggtgcatttacacccagcagcattcccatctgaagaaacaacagcggaggacggaacaggttcaaggaaatacaaaaccttgcctgcaaaacccgggccaaaagctcccagcatgctctgaggtcggacaggacatggagactaccatgaggaagggttcttccctcaagaagaaaacggcagagttgcccgaagggggggtgagaacgtcagaggtgagtgagggaagaagaggggggcaggaggagtaacgcagaggtgggtggagcctcgcgcctcaccaaccgctcagtggctgttacaaagttcttctctttcccaaccatccttgctatctagtcccaaaccggcgcccatatcgcctagaacatattttagaccaaaactggatcagaaagagggaggaacagtattttcttttacatccaaaataagctcttgagaactcaaagaaagcagggttaacaaaaaggttggcattagaaaaaaatgagggtgacgtttctgagaactagagtttgacagactaggactggacaccctgaaagacatctgtggaggacacacagacctccaggccaaaagacaagagccccaaagtaaagtatgacatctcagggtggcatttcatcacacctgcgtgcacacacacacacacacacacacacacacacatcacccttctacagtgaaataagaaattggtccctttgagatgcggtgggcaaggaaccaatgctgaggtaaccaaggaaacgcagctgcatcttggtggtcctctccggaaggtcagaaatccccttgtggtcaaacatccttgaagctgcaggctcttctagctataatagaaacctaaacgccagggcactttcccaaacaccacacatgtgcacgaagaaaaggtttgcatcatcaaagagccagacttcacagcagagtcacctacacggtgggtttatgtcccctgggcctctcaaaagggctatgtgaagaagtaccctaaaagagagggaagggaagcttcaacacacccttctggccatcccttcccaacccttccctcctctttctggaatgtgctgtcctttgctgtgctaagtaaacttctgcttaaatcgtctgtctctgcattgatcaattcatcctctcaagacacgggaatcaaggaaacatttacctttgccattaaccacaaggggtttgggggagggagcccagaatacttcttcctcctattagcaaactattcttcactgtctctctccctcactcacacacgtcctagtttaggctggcccggaacttactgtgtaataaaggcttgcctggagcttactgtacaacacaggctagcctggagctcaaggcaatccacctgtttctggctccaagaatgtttcgattacaggcatgagccaccaggcctggctactccacagcctctttacaagagtttgaaaaacatcctttgttttatataaccaatatttaaataaatccactatggctcttagagatctgttaattatttccataacagtggtgaccaaagtaagacaaagattacatgcaaaagtaacaaggaattgagcagagttgattattacaggtgaaaattcttgatatttcagatgatttacacccctactattagagtctgtcttaaattacagtaaagtcaattttagaaaaaaaaaaaacctttaatgataacaagaaaaagcttaggatgcaaaacaaataccaacccttacacacatgcacctccacatgtaccacccacacgttcgagacacacacacactttcccaaatacaaaacacacactatcacatgtgatggggatgtccttctgtgtgctgtgaatatatgcttttcttattggttgatgaataaagctgttttggccaatggacaggcaggatatagccaggcaggaagtatgggtggggctgccagactagaaggtgtggaagatggatgcagggagtgagctgtgagacagcggccatgggaagagacctatcaggaaggtaggacgcctgggcattctctgggaagatacagtcatgtggagatacacagattaatagttgtgggctaataattaagagagagctaaccaataataagcctgagccatctaccacacagttataattaatataagcctctgtgtgtttatttgggactaaacagctgcaggacctggtgggggacagtaacttccatctacaccatgtgtaacacacacaaacatacatgcacccacacatgtactacccacacattcaatacccacgtaccctgtacatatacatgcaccacaaatatacaacacacacacacacacagagagagagagagagagacagagacagagacagagacagagacagagagagaaagaatgtcccaacagaacaaagtacttaaaagcattttttgtaagctctccctgtgatgtgtttctgaggaaaacgccagagctgtcatgacagggaaacagttctccactccacaagctgctcacacccctcctaaaagaatgtgtctgcaagggggcaggagctagaaacgcaaatcccagcacctccttctgattcagaaactgagacaccatcatgtgacttcaatccagctaacatttgccaagttctgtcctaacggtagacatcattaccagaaacaatttggattcgtcatcacaaatccactttaaaatacagaaaactaaaaattaacaaactttcctttcttaaaggactttttgttttgttttgttttcaagacatgctatctctgtgtagccctggctgtttggaactcactctgtagaccaggctggccttgaactcagagatcctcctgcctctctgcctcccaagtgctggaattataatcagtgctcttcctgaggtcccagggttcaatttccagcacccacatagtggctcaccactgtctgtaactccagttccaggaacccgacaccctcacacagttatacatgcaggtaaaatgtcaagacagatttaataaaaggcatgggcataaagtttaattgtcaggggcatcgattaagaatataagtcactattatctgaatgactaaacctctgagaaaagacagtatgtagggcatcttcctatactcagtatctttcaaaaataatctaaaagaaggcaagaaaagaaactaattcttcacactagatgggcttatcccaaacacaagtaacattaacaggggttcctaaaggggcacctaaggtttccgcttttcttctgtggaactgatgaaagagacaagtgccctccactttgcgtcttttttgatgtgactgacgacgggttaataggtgtaactttaagacttctgggtctccctctttctacacaggaagtgatgtgttttcttcagactcacatatgagagggccccattacctgagctactcctgtaggtgaggaattagccacctattacaactgaacttgtagtcacattcagtgtgttttcaaagacagacatagggtgggcttcaaacacttcagagatctacagaatatgacatttaaaatgttttaataacataggttatttttttatgacaatgagacgtgtctgctcctggcagcatcaatataattcagagaagatgctgggcatcgaagaagctcacatggagtttactttctttgtggcaaaggtaagacactgggcaagaaaagtgcctttgtctctgctgctgacagtatgctgtccaaaatggacaaacaggacaccaaaaagtgtgagtgcgaaaccttgccaagagaaggcagtccactccttcagaaaatccctgcttcacagaaatgtctgtgagagatgctaggcctgtaggccaaagatggatgtcccagtgctgcagaggaaccttgggtgactgtccagacagccagctgtttctgtcatttctcacagttttggggagtcatttgatcacacttcctgtttattcggttaatatcacttccttcttcagtctctgagggagttgaagactggatagcatagttatagttttcattgtttaccagatttagaaaagaaattcactaaagatgtgtaaagtgtaaatgctttgagacacattaaagtattttaataaagcaaatgagaatagaaagtaaattagctacaagactttggactcgccaatttaggatagaaaatgaagtagtttctcagaattgtcaaatgcaaatggactagatattttctctgagacattgttgatgaacttgtctgtatatattgtatatatttattgtactttttgtatatagtttttcttatgttagttgtagacttctttttgtattggacaaaaaaggggaattgtagtgatatattatttatgatttattaaagcttgactgaggattcagaaaagcaaagtcagccacaagccatagaagttaggcacacaactttaatcccaacagccagaagctaggaggtggtggtacacacctttaatcctaggactcaggattaagaggtagacggatctctatgagtccaaggccaagtagaactacacaagagtgactcagtctaaaagagaattatagctcacacctttcatcccaacattagggaagtatgtaagacagaagcaaggtctcagagaggcatttgttctccagccacgctgaggagaagttacagtctgaggcttggtgagagctcatggagacaggaccagccctttcagcctgaggtagaggtgagagctagtggcctggctgctttgcttccctgatcttcagcttgaagactgaaccccaatatcagtctctgggtcatttattagtttgtgttacaaagtcctgcaagcaccagaaagaagtacgtgggtcctcccacccaccacagctctctgcctcctcctgcagggctcttcaaacatggcttgggaaatacctaagaccaaatacacagaccacagggatctctcctcaccatcaggagtgtgaaatcatccttattttaagtcagtgtctccctcacgcagaacgtctagaagggtggtgcttctgttttacttactatttactaccccacctatccaaatgtgtgtccagcagacaacggcggttcatatttgctggatggactgatggacaatggccgacagatgattagatagcccaattacttttcattatttgacagctctactttaaaatgatccacatgtttaactttccaacaggcccctctttagaaaatgatgaattggcataatccatgtaaatatttagaacgtgttttaattcctatttctagaatcaagcagtaatttcttgagatggtaaagaaaccaggaagaatgaattcctgcttctcttgtcaaaggcgttctcattctcctggcaatttttgtgcatcctttagggcaaggaaccgggaggtggagacaccgccttcagaaggagctgagattttgacgaatcacaactgtgcaggcagagtgacagctggatgagtgactatgctggtcccaccgatctttcacgagaacacgttcaagtcacttgacctttttaaggccgattgccttgctgtgacaccggcaaacaacacaccacagagggcttctggaggatgcagctactgttgctccacacaccctgggcaaactcccttgctcagtgaagagcccaggattcctctccagctcctatcagctcctatctaccagacctcctcctggaagactgagtcagttgctcatagtcttggcaaagccactgccagctgtgttaattagaggcttgaaattatagtggcgattcctacagtgctccacaaaaccactggcaggctcagaagcaatgtgaagtgcacagattagccagatgtaaagcctgggtggagtcggaggcactgagagaggggccctccctcccgccctgtgaatatttctcctctattcctgagctacagcagattagcactatcaggccaccgctgtctctgtttaactaaggaacagctactagaaaggtcagcttgtgttcatgcagtggtttgtaaagaaagagattattgctcaaatgaactctgtgttgcaacaagcccctgcccggcaatggagcaagcaagggcagggtgaatctcagctcttggaaaggcctcagcagtctagcagaactggaaagaggccagaaagtttcagagagtggaggcgcttactcagttaccagaaggcacctgaccgttctgaaggttgagggtcccagcttgcaaacaagagcagaggccggcaggagagaaaggaggggaagaaagaaaatttagacaaactcatttagaaaaatgcaccagtgaggatgacatttaaccatacagatattgaatgcacgcacacaggtactttggacaaagatgttacctgtagtataaatttccttgttatgacataatgagatcattgattatccatacatggaacgtgagttttaacattatcagatccacaaactattcatatgcaaatgtaaaaattcctcttattctaatccaatttcaaaagatctcctttaaaagcaggtgactgtggactaagtgcctggttctccagcctcacttctgcactctggttagcctctggtgtgagcgaagttacctctgatggggtctgagagtgaaaagacaaaaaccctgccttccaggaactccccacaaacacacaggacaatggacctatcagggggccaagaaagaagaaagctgagagcgtggaacagaggctgccatttaaaatcaaatcatcagggatcattttcctgaaaatgtaacagaacagaacagtagcaagctcaaaagacacaaaccatggctacaatttgtggtttcagagcacagctctgtatcctgagcagagaaagtgaggcagaaactgccgaaggcacagactggggcccaggtcacacaacaaggctttcaagactacatatatttgatttttaagccacatgtgacaacatacacttgaaatccctgcattgggaggctgagaggaggaggatggacatgagcctgaggccagctgggctacttagtctgtctctaaaacacttggaaagaaggagagaagggaggggggggcagaaacaagacttttgctaagaaatgagtgtcagaaggtgctgagaccagggttagcctgggcatgacataatctctttgttggggttcactgtggctactgtgtcagggaaagtttggggtgcacatgtgaacagaagcaggaagaacaaagcctgaggctacagtccaccagagaccacagtgacaaggaccaaacagttgtgaaggacgtggtcagatcccggagtaagtggtttttgaagagcaatgggacagaggtgggtcaagagtccagttagcaccacaggctctgagaagacccagggtcaaatgaccacgggcaaaagctgtcgctcctttgtactccaactttcttctctgtaggtggagctaccgagagcatcacgttaatatgaatcccaaagactcactgacggccagtgagacttggtgcaaatgccaagtactttgagcacaaccatgatgggtatccaaagccagacggtgcatacctccattagccagagtacggggcgtcgctggtggcatttgacttctttagggagagtggactggaaaggaactaaagtggaaacagagttcagaggctgctggagggtagtagagctgatgggaggctggctgggctggccagggaggtgggtgggcccaagaaaacatgggtatcgtcctagtcttttgcttataggacatgacattcactgagggaggggccctgagtaacctagggacaggtgggggagaattacaagactgaatttccttcctcctcagtacctcaggtctactgcctacaggaacaggaaatgggaaaatgtcaagtccaggggagaagccaggaagggcctggctgcccggccccactcacgccctaaaccatggagatgctctggatgtgtgtgcctaaactggttgttaaacaggtgggagtgatcaactatgatggaaagcaagctaaggggggcttctgaatggaggatagaatcaataaaaacaggggtcgatgaggaggaatggacaaggaaagccagcccacagaaatggcgctctgtgaaagccagccactcagacacctttctttatcccttttgcagctcaccttgggtcctcttgttgcacccacttagcatgtggaccccaggcgagtctgagctctttcctgctctaacgagcccctggacagccatgcttctctcctcttgctttatctcaaacacgtgagtgggaagcctcagtgcaactcccaagcccatttaattagcacaattgtgagtccaaagcatgtgccatagatgagagatacagagcaccacacagagtggagactcacagagacaacccctggcaagggcagagatcggctcttgcacactggaccctctgagtgtgtctacgtaactctttactgtttgtctttaggtaatgccactggcctaagggaacaccggtatgaagagactccaggaatgctggcatggatattttaagcccctcagctcccctgctcattatggtccagtttgggaatgagcctgcaacacagactgcctgccctgtcacaggaatgctgcatgtcaaagccaggtgtgcacttcctcaccaggtacttcagggccagttgtccaaacttgctgagcctcacagctcccctgtttgtaccccactgtctcagacctctccttcccagccatcccccgggggtccttttcctcctgcccccccccctttagcccgcctttggcgtttgaaatcactctgggttttcagtcttggttttacctgcttcattccaggtgctttgctaggaagtctaatcaccaccacaatttcaaacaccatctataggcatgtctgtaaccttaatactcaagcctagcttctcttgccaagaatgaagcacagagccgtcttctgatattcctttgtcctgtgtcccattggctcctaaacacccacagcctagaaccaagccctttgctctgttctactcagcttttccacctccaggctcagatcacatcgtcggcccggaaggccggggctgggaagaggtgagctgctcccccaggtcacctgcactttctctagcgtattcccagttagtaaatcagctggcgatggggacttcagagcaagtcagtttcctttcctccttaggcttcccgcctacaggaaatgaaaatgtcaggtcctggaggagaagccagaaagggcaaggagtctaaaaccctaagtaagactagcacgtgctctagacctgaggccgcccactccgctacctgatgtctctgaccgtcttccaacgctgtggaatcttgttgctctacagggccaaggagaacacgagcagaagctgtgagagatgggattcctttatttctttcactgtgagcttctgcttatttgtttgtttgttatcaggtaaatatcttgataaatggagatgaagttccgaagcttctgagacgaggcggggggggggagagggagcagagggaaagcaggcagcagtcgggagggggcgatgcccgggagaggaaagcacaaagagagaaagactgggaagagccttgtgtggccaggtggttgacctatcaggcattgaaagaaggaagatgaaaggggcagaaatccagagaagggtttaaaaaaaaacaaactctggtttgtatacacgttaaataaaaataccctggatggcctaagatccaacccaagtctcagcagacagaatccaggaattggagttgactccatttgagcaccccacgtttgctttgcactgtttcccaagttcatgtcaggcataagcgagaaacggccttggcctgcccaatgcctttggtttgtgctgagcctggacctcctgcttctactctgcctgattcagtgccatccctggttcacagtggactcatccatcttcttggcccaatgggtagcacacacctgtctgccctgttatatacttagtgggtcctcgtttagtgtcagagtccactgtccacataatgtgtaaatcacacaactgtgaaattataaggtccttgtcctggctagttttatgtcaagttggtaccagagggagccaaaccctcagttggggaaatgactccaccagattggtccttgatgcattttcttaattagtgagtgctaggggaggggccagcccactgtgggtggttctggggtgtagaagaaagaggctgagcaaacaaggaggcgcaagccagtgagcagcgcccctgcatgacttctgcttcagctcctgcctggagttcccacaccgatttcctgagtggtaagactgtggtgtggacgtgtaagcaaaataaatactttcctccacgagttgcttatggtcatgcttcatcaaagtaataggaagctcacctctaacgccttcctttcccttctactaaaagcgtgactcgtgtgtgtctctacttgtgtgtggtgttacaggattacacgcaaagagaagggcaccggcattccgcttgcctcgcatgcctctgactccttaggttcaatccccagcaccatcagcaacaacaaagaagaaagcaaagtgaattaaaatttagaactatgcactggagagatggcttagcaattatgagcacattggatcttccagaagacttgagttctatttctagcccctatgtgggtggactcacgactgcctgtaaccacatacctctggctccgtgggccatactcaggcactcagacacacatgctcactcacaaacacatactcatattttactttttaaattataaatgtatacatccaggcatagcaacacacagctataatcccaagactctacagatgaaggcaagaaggttaagaggttcaaatccaactttgactacataacaagttcaggcaagatcaggccacatgagagcctgagccaaaaaataaaaactaaaggatgaaaaaaatgaaaagagaaaatatagcccattttttctcattctttatacttacgtatttatttatggggctgggacacatgtgtcacagagcatggtagtcacaggataacctgtgggagttggttctctcctaacatcagtgagtcctgggggttgaacccgggtcattgggctgggggtaagaggctttcttgctgagccactgtgtaggcccagcccattatgagcaggctatttcaaatatggggcatgggaaaccgtgaagattataaaagccatttacagcaggctttggcaaacaaccctcctgggtaaaatctgttctgccacctgtttcataaaatgaagtctcacttggtaaacacaagcagaccggcttgtttacgtgtccaggctgcttctgtactggagttgcagagtgcagtgtgtgcagccgtcagcatggcctcacaagcctcacagccagacatttactggctgacactggaaggcccccacccccagagtggcacatagtggtttacaggccttacacagctgtcaaaaacttacacatacgtatttatgtacgtacgtatgtatgtatatgatacagacagatgagcgaactacataccttgaaatcatcaatttaattatctctaaagtggagcctctttcattgataacaaaaatcttacccaggggcttaccacagttttccatactgcataatttcagtcagtctcttgggtgtgacatgatccagggattttttttttttttaatctgaggggttgctttctttaacttaacagtttaccatccggtatctagtattgttctattgcaatgacctggtgcctttctgtgcccctttaagtaattctgaagcccaaactgatcaacagacacagaagaccagagttgagccaagttgtggctaattaataaggctcgaatacccatacaactctctttggctgttataacagaaaaaagctattttgagacatttaaaattctatcactggatctatcaacagaaagaatgtcagctggactctgtcctgacatctcacccttcacatgtccacagagagtgttcgggatggaaagtcggctgtgtagtcgtaaacaatcttcatttacatctgagttacaaaaggcagataatcagcaaacagtgtaggcaggtacacctacacacagacacacagagaacgctgctctagacagatccatgcatgcacacacataaacacatatgcagcatattgctgtatgtttcagagtcacgcacacatgcacagatgcataaagaatatcacctgatgctctgacattaaagtgttttccttcacttatacgttgactaattaagtgtgctcttgggttcggttatcacagacttacctttgaatagatgttgagtgacaccaggatataaactaggattcagacaacagtaaccatgaaaagacttgacctgacgatgctttggggctggtgggtattttctgaagcatatgcctgcaccggttttttgtgatgcttaatgttttacaaaaccattatcgttccattaactataggtcatgttagtaagaactgggcacgctggggaagagtgaaccgtgtgcgtggtgcgttgagacgagcattctattcgtgtggattcttccctatctagtccttcacaagttggtaagacgccccccccaccccactctcccccacccactcccgtcatttcacattgccatctcaggtcctaggagactgaccttccacacacagcccggtaaatatcatcctttattcttattccgaacacgctttctgtttgacaaaaacatctgcctctgaggcccacagaaggcaggacgccatcaaacctgatgatctgagtttggtccccagagtcctcatggtacaaggagagaatccactcatacagctgtcccttcacctcctctcgtgtgaaccacaactcctgcacatatgcacactcgtacataaacaggtgacataagaactcttcttattgctcaactaaactgtatcagcccataaccaccacggagatctagtcacacctccccacgacctccccagtcatctgcagcacttgtggacagtagtagtcactcacttaaaagccccaggtgtcacagtttccaccacagtactaggcaccagtgacagtcaagaatcacgcctcaaacctgagtcagctctggggcccctcctgtttctgcctcctcagtgctcagcatattctgtaatttttctattgttgcagaatgaaggtttacttggggctcacagttccagagggttagggttcacgatggtggggtgcaggaggcagtggcaggcagccagagcagaagaggggagttcatatcttgaaccataaacaggacgcagagagagctaatttgagatggtcttttgaaacctcaaagcctgcccccagtggcatactttctccagcaaggccaagggtctcctaatccccctcaataaccatcaactggggaccaagtagtcaaatgcccaagacttatgggggcatctcattctaattactgcactaagattacagctttttaggtggggactggtgtaagcattctgacagatcggatgggatggacagggatgaattctggcacttgggagtcacagaatactgagtgttacagctctgatggaaaggtattctggcactcgggagccaaggaataccacaggtcacagtaagcatagcagcttactgccctgcttcagggaaaggcttccccagatgtgtcagctctgctctggcaggagagggtttcctggtcagttcggccagttgggctccagatcctggagagcagagtgtaacaactctgcttagccaggggaaggtttccccgggcaatgacaagtgttacaaccctgcttcactccactccgcccaaggtcgtctctgctcctagaaaagaacatctcacccaaacctcattcaagagatttattgggagggaagaatccaggagagtgactgccctctgccagggtggcagaggacagctgagcagcccaaatggccagaagctgaacaggcacagggtttatacagggattcttaggggtggagtttttccagggagatttccagggtagggattggtcagatttcaatccctgagcttaggatggctagatctcctactcagagattggttagttttctgcacagggcctaagtgtgtttctttctctggtcccttttagcctttggctgtagttttagggccagggtgtatttctttcactggctctgattccagggccaaagtgtgtttctttggttctgctcagggtgtgtttccttggccggccccttttccccgacaactaggatctgaactggttccttgcacttgttcagcaagcatgttatcaacagcctgagccatctctccagcctgtttgctgactcttgattacaactgggaagtgatatcgatcctgtcagaggactgagaaacagagagtatgctctcacttcgattcctttccaacaccagtaaaagacgctcactaacaaacagtacagcacattatttttaactctgtgttagccacagctccacccagcactggcaagcagaaagtgtatcagtgacagctcattgaacatttagatcatcttccctcccagggcttctgagttcttattttaaaagttcaattacgcacaggcatctctcacttaacctcaaatccattgcaagcaggcgaggtgtatacaaacacgaatatctggtagccagttagttaggccaatacatgatttaaaaggtaatgaaacccatcagaagagccaccgtgactaaagacactttggcctgcagacaaagctcacaggagcctacactgcttttatggatgaaagttgaagtcggaaaatctgtgcagccctgacagaggacagaacaagccacgggggcggggggggggggcgcgcggcacaagcaacgtttcgttaccaggctgcttgtgcttctgtgagctgacaaatacagctgtgtttctacttcccacaagtgatgataatggtaagttagtcaacacccttcagaggtattagtgatggaagttacggatccaattacaaacccctctttccgcttctgcaaataaagtaaatgaagccatgctgattactacacattagcatcggaaggccggggctgggaagaggtgagctgctcctgtccccaggggcacacttgaggcagtctgagtgatatacacacttccactgatttcagggtatttagaatattttatatgcgtagcccttgaaatgagtacagctcgagcaattgcagcaatgaaatggattttttaaggggcaagtggcttaatgaagactatcagatatctagaaaacatcggcataaccaagtatcccagggcgagaagcagcaaagccacacctacccgtctgctgcctccacccctccccagagtgccttggttagcaccaagtgacaatccaagtggctgaaatatgctgccaaaatgctggcattttccttttggaatgggaacgacaacatacaactctctgatatctccggcactcctaacggacttcgtgaatggagggtataagcacatgtccctatgggtgcgtgcatccaatgtgctcacacatacatgtgcacacgtggaagccaaagaccatcatcaggggtcttcatccactgctccccacatcatattttgagcagcttctcttgcagagtccggagctccttagttcagctggggtggctgggcagtggactccagggcgattccccccccacttgctgaggttaaagacctgcatcagctcccaggagactttgaatcctgtggatatagctgaagtcagcatgggtgtgagggagaagaggagccaggcacttagccacagctgctctgttgctggacttcaggtgagtgctctgataaccacggcacagaaacctaacaaaaaggcggccagtaagccaaacataactgctcctcctgagcttggctttacagtccttccacccggctcaaaattagagtccaattttatcccacttctacttttgtgtatttttattgcttctgctaactacgaattcagaggtaacccaagactcttagatgctcagtgaaaggtatttcgtgcttattaaaaggatttaaatctaacatatccaagcttttttttttcctctcattttactttgtttttgaaattttctttaaaagagagagagagagaactcatgactacccatatttgtgagtttcctatttattaaatatccaaggcataaacagttaaatgtacacaaacaattgaacgtgcgcagctgaatatgtataagcaattaattaaagatgcaattaaagatgcaggaagaatcaagtgtgcagaagccaatgagcacaaacaattaactatgcatgaataattgcacacgaacaaacaaccaggcaagcgtaaacaatttaatacgcagaaaataaccggaagtaattctactagtgtgcacagcatttattaactactctgcttcagtgttgtggccaatcaaatacttgataggtaacaactgaaggaaggatttattttgctgcatggtttgagcgtacagtccacacagtggggaaggcatggtggctggagtagctgcagttatagcagcaggaccacaaggctgcttgctcacttctggatggatcaagaaacagagacaggacagcaagtatggaaggttataaaattccagagtccactctctaagagatgcacttgctctagctagacctcacttcccacaggttctacaacctcctacaaacagtagcactacctggagatgaagtcttcaaacacacaagcctgtgcaaaacccttcacatcaaatcactatctaccacaaatgtaaaaatgtggtttgggtgaacatgaggaatacaacaatgcaaaaacagaaaaaaaaaaagacaattgtgtacaatttatgcaggaggtaggggaggcaatggcaggagatgacaactattggctcaagagaagggtggtatcattggcacaagtaagaaaactgctcagcaagagggaagacagtgccaagccctgtctacactgagctatgtgaaaagactggccaagagtggtctataaaatgaaaataagccatcagtactgggtaagtgagatccctgactgcccaatgcctattcttagttcttacgttccataaaaacaccgtgaacacatgtgcctgctgtgacgagttattcctcagaactctctgtgagtatccactgctgcaaggagccatactgatgtgggaataagaaagaaaagagaaagggtgtcttgtcagcatcagagggtattagtgctgcactctgatgacaggaattatcacagtaacaatgataatagaaaaagcgtctatatttggattttaattattacacataaactaccaagtcccaagcccgagagcatttcatttcctagtcacttcttcactctccaacccttctctcatgtgcatgaccttccttaagtgcctatggctggttattccatttcagcgatgtccacgtggttccaattactgtagtctttgtcacataaaggtctaagtggacaggatggagaccctgtgcagagtcctgagcacaatgcccctctctagactctatgctgccttctcactgaagcagatctctctgcctcaaccatcctcttccctcgctcctgactgccaagtgcaaacaacctgcactttttccatttcaacacagcatctttaatcatggaagtttcccatccccctctccttccagaatttgctttcttgggagtttcttgatttaccttttcatctcagcaactagcatgatgcctgacttaggaagagaccaataatcactactttgtgataaacgaacccaaaatgaactgaatgggaccaatactcaagtgtcagtagctagatggggtagaccagctagccaggtcttattttctccctgtagacacactgagctcttgccattcagaagccactgaatggtgccttgtaagtcaccctctatttcatgtacttgtgttttttcccttagactccactccagtttcaaatcctcagagaaagccctccagatggtctcatctccagctttaccacaccctattcccatcagtgcatggctgctaccatggtctgctaattgccccgtgtttgtctctcctccactgttcctagtcagcgtgcaaattgtcccaatgctcacctgtcgctgttactgcattgtgagagtgtcaaggtgcctggaagccagacagcttcactccatctacacaatnnnnnnnnnncagtatgcaggaatgtgtatcctaggttctacccgtggtaacctaattccagctaggttggcctgctccgtgactttacattttttaaataagttgccaacttttaaagattagatttcatgattttagaaaaattcaaacttcaggcttcttttgaagtgctggaaggagtagaacaccgaccggggctgggacccgatggaggtgcataccagcttctttctcccgagaggagggtcagacagcccaggcctgccctgatccaggtcactcacacacatgagtctcaggttcatctagactctggccttcatagcttctccaaaagcttccattctctacattcctgcacagggctaccacagaccctgatcaaaactcagaatgtgccttctgagaagagttagaaccagaacctaccacctcagctgggcatggtggtatacacacatgcacacatacatgcacacacgtgtgcgtgcaggtgctcacacacacacacacacacacacacacacacacacacacacacacacacgatcagagcaactggaaacttgaggcaggaagactgctacaagccccaaacatccatgtatgatgatagaaaactacatgattaaatacaaaagttgaactcattatgtgctcaaagaaaccccagggaagtgtctaaaagatttaaggttatggacaaaggggatattaaaacactgaaaggtcaatgaattggaaaatagatacaatcaatatgatggatgaatggttatgatcctcaattaaaattctgtaaggcaaaggagaactgataaaagataaatacaccttcaagtaatccacaggagaaatacaaatgatcaaaggaccaaagaatgtacagggagtcaaatgaccctttaacagaggtcatccaagatcatcaaaaaatccagatatttacattataattcataactgtagcaaaaattacagttatgaagtagcaatgaaaatagtttcatcattgggggccaccacaacaagaggaactgtatcaaagtgttgcagtgttaggaaggtggcaatcactctaaggaagtgactacaaatgagatctccatttgcatctcacacacagacatagtcaacaggagtctgtggactgagagatatattccagacgctatcagttcaggaaagaattttcttgcaatgacatgaagtttagggttcaacagcataagaaccatcacgcactgtggaaagtaattttgcaatgtatatcaagaggtatagagtagttcctatgacccagtaattaaacttcttgaaaattaccctaggaaaaccatcagcatggtggacaaagattaatgtatgagggtgttaatcacagcataatttgtaatatcaaatatattagaaacctaattacttaacaatatggagtgattaagtaaattacagaacattcaaatgatgtctaattatgcagtcattaaaatgacatgttcaaaggccatgtattgattcaggaaaatgctcatgaaaaaaagtttaaagcttgcattttgagaagattttcgtgtaacgaattaaagtgaccgttgttactttccactgatttactatttaaagcatcttcttgcccacaaagcctctaacatttatccatttatttcttgtatctctttctgttattttgtgttttcagacgggggtctcatgcaagcacctaggctggcctggaactcacagcagtcctcctgcctcagcctcctgagattagggattataaaggcacgagccgagatgccctgccctttccataaacatttgacttcaggtgagagtcaaaagaagagactcagacgacaagaagatgaattgtttgatagagctaaagaggtgatgtagcttcacacgtgacgagcttctacggaggggtgggaaatgtaccagacggtgggtggtgactgcttcaagagaagccctgacagagaagggatggggagcagaggcgacctggagatggggagggcagagccaggaagcactgctgagtggcaaggaaattcacagcacaacaccgcagaaatcagagctgaagaaatttcccttcatgatgtattaatagttttatgtagattagacaagacaattacaagaagcactgttggcttcttgtaaccctgaccacaggaagggcccagagggatgtcacggtggaaaagcagaaccttgtccctgccacgagaagcactaacaacaaaaactgaaagtctgcgggcaccaaaataaactgtctgcgcagaggacgattgtagtaaagtcaggaggagggagctgcagctcggttctcgcatgactgggctgtgcaggggcagactcagaatctgcaaggtcatcagctgcctgagtgcctcactcccaccgcaggtgacctcagacctgggtctggcaccgtactgcacagctactggtcccctccagggaacagctggccatcttgtacgcatttcatgtgtacctctgtgcaggggctgtttgcacagtaggttcacaaggaacacagctggccgagaaaccaaataacactccagccgaaagctagccataggacccacacatggaagagtcaaaagagaccaatgtgggtgaaaattgctaacatctcaaggaaaacgagtggtataattaattccagaaggaaaccacacatgctgacgagggaatgacaccttgtatcactgaagggaacaagacgagttacacacaccagcagaaccactgaagggttctgtgtgtctgtatgtctgtatgtctgtgcctctgtgagtctcgagtctgctcctacagcatctctgattctaagagggacctgtttggataaatcacaaggccaatgagtccagcagtccagagcccacttgctccctttctgagcctggtccttctctctgcaagcctagcttcccttatgcagctacacagcatatccttgctgttctgctgttctgcttttccaaagtcgtgtctggaggaagtttggtaagagccgtctacgggaccccagccatttccgaatctgctgctctcccacttcctctcagcaagttgtttttgacccctggtgacccctgggtggcttgaattcctgctctttcgtctttgaacacattgtttctctctaagaacgtatttgttctcagctcaaatgcaccacactcagtgcccctcacagggtcttcattcccctgccctcagtctgccttctctgcttctgctctagctgtgtgttctccttccttcactccacggccacctctagcatctgcattttctactcctatgctcaacctactaaaacggtgctgagctaaacgtgagtcttgacttcaacgtttggctgtccactctcctgctggtgtctcgagacttcaagggtacgggggttgatttggatccaacacctgcaattgtgttggtttagcctgactgtggggttcatgtcctgtggcgtatgtacaaggccaggcctgaagcatgcagctgctcgcccatgctgagggacagccttcgccgagaggggaagaccagcttccagtgaagagtgtgcaggtgggctcgactcctcttagaaaacaccaatgctgctcgctctgccccaaccttcactgcctccccgcaccaaggtgttacagactccgaggcaaccctctgccccagacacactaactgtcactgtgttcctgtggcatggcttgcaattttaattctcagcctaagggttatttctttctgttcacattcaagttcattttctactcttcttttttttcccctagcttgaatcagctctgtcgcctgacttttctttctctgaaatgggactttcccacatccgccttcccacttccttctacttgtctcttggcttggcttttggttcctcaaggcctaaaatgcctttctgtctccacagctgtaactcggctgccctcacgctgtgaatggacagactatgaaaatcttgcatatgtctaggtattgactatatcacaaaagagcaacagtcctgtggtggggctcttagacctggattccttccttgaagacgtaaaaaacattattcaagtttatgtccattaggtgaacatctgaaggtggagggcacaggaaatgtccaaagagcaaccttcacaatctgacctccatcaatcagtatctatttcatcaacagataagatgggtaggaaaacagacaggagaggcttgagacattttcaaagcctgaactttatcctctcaaaatgatggagccattggcaacaaaaatcaagtcactgtgtgcacatttagaattttacattttaaacctgtctgtgttagatgatgcaagttcaaaatcaaccatgtttgtggaattgggcttaccaagcaatgcttatcaatacttaccagcaatgaaacggaaacaccactctgaagaaatttaggacttaacttataaattccgggagtccagtggggaggactgagaggtgcaagcctaatgacttctattaaaagtttgtcaatatgactgaacgcagagctctctctgggctagccctggctaagttatagaataccgctaacccacctcttcacaccctgcctcctcagaagcctgtcttccctctctcgaggctctggtgtgagaggcttacttcttccaggcacagaagttttctcccaagcctcttcttcttgtcaatggctcccttgcggaccctgaattgcacaatggggcattctgccaacttactgttttctctgactgaaagcaaggagggtgggtgctgaataaataaggacaccagaaggtagaaatacaataataaggcatctgcatgagacaccatgaccaggtaagcaagatacttgctgataagaatgtggtacctggtgggccagaatgtagatgttgtgtccaacgtccttgggagaaaccccgtcatcccctccttcctcgtccccgtggtcacactccagtccttggttataggcgttcttcatcacatccacctagcaataaataataaataagtaaatcttgagaaagggtctggaaggtggcagcaacacttcatattgtttgtgagctataacttaaaactgggaagcttcatgacagccaaaaataaagcagctctaaataagcaaatactgcatttttctcttctctgcagactctagactgaactgtgtgcatgtgccagtctgtcgggtgtgaatgtagagggcactgtgagaagacagaaagagacagaagggaagggagagtgctgagacagggcaatggagtacgcatgaaataaaatcagcaggtatatagggtgaaagggggaaccggcgaaggggagacgggatagaccacgtgacggggaccaaaaagaaagaagtgtagtggcttccactgtcgactggacacagcccagagctacctgagggagtttcaatcgggaatgtgcctccctaagattggcctacagagcattttcttcattggaattgatgtgggaggccccggcccactgtggctggtaacatccctaagcaggtctgcccgaggctgtgtaaattaatgtgagccagggcattagccagcagtgcaagccaaataagccctttcctccccaagttgcctttggtcatgctgctttatcacagtgggagaaatccaactagctcaacttatttgtgccaaagcgccataataagaactaataatatctaccaacagaaaataatttttaaaatattttttgaaaaccacagctatttaagtgaacatggaatcaccgtgttccctgtttacggcgtatttaagtgaacatggaatcacactgtggcaatgttccctgtttatagccaacacttctgcttctgtctgtgaacactagcacgctgaagtctccacgatttaagagagtctggaaccctgagaaatatccactgtttactgagcactcaagagggagctggggacagggtgctggcaccagtgctgggcactgaagaacctgcgtggacaaggagagtgcctctgcccaagggcgtgcactgttgtatgacaggtctccggcaggcacctaactcagcttgagggtggatcatggaggaggagcagatgacagaaaagggttaaaatggcagaggggactcttttcaaagtgagtgcacagtgctctgtcaaataaattcatagccatatcccccttaaccagagtgcaattcctagtcttactctactgcctggagagacgaggctctaactaaagaatgtcttctctctccatctccactctactcttcaccagtgagcccagagagtgtggcaccagcctcccttgcagtctccacagcaccagcagcatcactgacatgacaggactttgtcactggcgggagggcgggcacactgagcagtatgtcttgagcctgctctctcgggtatctggaacccattgcttttgaagcatgcccggatgacatcattgtttgtgtgccagaaggcaaaagaaatggagcttttaacttgtgcttgtggagtcctgattgtgtctccctctttctctgaggccagatgttctgtgacagttcattcatgagaatgatacacaaaacacgcaaacgaatttatctgtgtttttggaaatgtacaaacaaaactcgggggtgtggtaaacacagtcttcagaccttccttacaaaccatcattcctgggtgttctggggacccggcttcagtacctcctgaggattccaagacctggggatactcaagtaccactataaactggagcaacttgcatgaaaaccacgcacctatttgcaccctcctgcatactcaaaaatcatctccaggtggcttgtgacatgcaacatgatgcaaacatgtgaatcattgcaccgatgggagaaaacagggtaagagtccgtaagtgtcggtgcagtgtgctttttaaaaactcttccagtccacaattgtgactctatagggctgagcccactactacagacaactatacccagaaatcattaagccaagataacttttctttttttgcaaaaggcacttgtatatagttaagtagtgtgtggaaatttagcaaagagaagtgcttaaagtcgataaaactggcaaaatcaggctggagcaatggctcagggttaagtgtgcttcctgctcttgcagaggaacccaagtccattcccagtacccatgtccaggcatgtacaacagcctgtaactttggctccaggtgttctgacacacttttagagcctctaagggcaccagaacacatgtgacatacatatgcatggacacacatacacataaataaaaagagaaaactaattctaaaataaaacctggtgagtccacaagcctgagtcacatggtccttcaccaccctccctgaatttaggccatggtgctcctgacagccctgctggagcagcgagagatgctgcccctaacagacagcctgggcaagtgttcttaccagctccctaggtctcatgttgaagagaatcctctctgcgttctcgctgtcatgtctgctctccataatagccagcaaaagcttggaggcgttgttctggggacaaggacagggtcagtacatgcgcaaaatccacaccacagattaacaatccctggcatctgtgttaacttagctcactggcaccctttgtgttttctcaaccaggtgaaatttgaaacttcttatttattttgtctaactaacggacaatagaatattttattcattatcaatacaaaataaaagcaacaagtcatgaaaatgggggttattttataaggatttttttttctgagacagggtttccctgtgtaacagtcctggctgtcctggaattcactctgtagaccaggctggcctgactcacagatccacctgcctctgcctcccaagtgctgggattaaaggtgtgcgccaccactgccctcccaaggggggatattttaaaattacaggtgttttaaatggaagactgactagatactacattaaatagaaatatattttcttccaatgttttttaaattggatttctatgatgacactttaacacaacagagaaacaggaatcagtgatattttatggacatggtatacatataaagaattcagtacaaccactttttaaatgaagtaataatgttactctaatattgaaattttacataaatttgtgaaccaccagtgagaaaagttgtaagttcctgagttagaaatataaaggtcatttcctgatagctcgtttacctcaccacatgctgagtgacattgtctactattctcttaatatagaattaaagcagtgtatgtttcagctgttacaattttgtttttaaacacactacctcaaacactgttgcttaagatatcaaagtaagaggcaattttcaatgctgaacgggtaccagagagtcaccactggaagtgctctgtcctcattgagataaaaccttactctgtctgatgtgtctgtgtgtctgtatgtatgtatgtgtatgcatgtgtgtgtgtacatgtgtgtatgtatgtgtgtatgtgtgtgtgagtgtatgtttatgtatgtgtgtgtatgtgtgtgtgagtgtgtatgtatgttgtacatgtgtgtatgtatgtgtgtgtatgtgtgtacatgtgtgtatgtatgtgtgtacatgtgtgtgtatgtatgttgtgtgcatgtgtgtgcatgtatgtgtgtgtacgagtgtgtgtgtgtgtatgtgtgtgtgtgtgtgtgtgtgtgtgtgtgtgtgtgtgtgtgttatgtgtggggtgttaaagacatgtctaagagactcggagttctcatggttttagaatgaaataattgagctgaatccatgtttggtgtaggaggacaaagcactaattgataagatcgtgtaaattaactcttgttaaacttggtcctacattctgtccaatgctcccagaacttccagatgccacctttaaagggatatctaatgattctgaggataataagggtgacgtcgggtcacaccaatgccacagccaccacaaaggatttcagtgcagcgagagggattctactttttttttctgtcccatatttgtattttacaaatattttcaaatcctacaatccacttttataatctaggttccaaaaaacaaatgtttaaaaaaatatggtttagggattagagcggatgacgggtccttagtcccacatgagcagagctgtcagaattccgaggttacacctcagcatcttggggcctgttctcagatgagccactctctgcagggccagtgagaaaggactttaaaatgtatccagttccccaacaccattggcagtgtggtgctttcaatcaaatttcgtacttggtgagattagaaagaaatcttgcaaataacatcctgaaatctgaaccgatctggaagtacatgagcctggatatactgaaaaacccaacagacatactcctgttagcgggattttccttccaatggaagctggagtgtttctaagcaaaacacagacatcacctcttagcaaatgcagcactttgcattcacagaccagttacgaaaacaaaatacaaagtgaaggacgagacaggcatctgagaaattcattaagccatacattaaatgaatatataaagcatatttaaaactgtaatttgtatgatattatatttaaattatattatgtcatatggtatatattcatagcgttatcttttattgaaggtatattactaaaattatggataattaagccatcagatccaggagtcaatgttactaaataattatttatagtgcctcatctcatgaactttcctaaactagccaacatatataattctgccttacaggtgttctcttaccaggcaataataataaaacaaaatctttagatttaaaaagtacactcatcttagtccttaagtataaaaccatatttaaagtatttcaagagaaacaaacacatgtgttgctttaggtgcagcctaatgtagctgactgctgtatgcttgaataaattgtgctactgaaataaataaaaattaaatgatccactttaaagtaatttaactagaacacctagtattttgattcattaaatcattatttaatttttcaaagtaagatctgcctttataagtaacctgcatgcccataagctgtgttaagtttatgagtcattcaccatctcccttacagagccctgtgattgacaagccagattttaaaatacagcctttaaacaaacaaagaactttagaggcaaaggaggaggcctctggatgttgagtcttcatgaattatggctaaagttgaatttaagagagaatgacaaactctttttagtgcttccagttgggttgcctgtcacacacactagatgctcacaaaccgaagaaaaggcacaagaagggcagcggggtgtgtgtgtgtgtgtgtgtgtgtgtgtgtgagagagagagagagnnnnnnnnnnnnnnnnnnnnnnnnnnnnnnnnnnnnnngagagagagagagaggggggggggttagatcttataaacagtatggattgtagggagaaaccctgattaagagttactgctgaccatgcccaacaagggtttaagaggagggaggctcgcacgcggctctctttcgcctggctgagctgactgggaagcatttctggatccatcttgctcaggtgcaaacctggtcactggctccctttcgtgagtgtttttcccccaataaactaccatttatcaacctgtctctgactccactttgtaaacatcaataatggataaaagcggtaaaaacacaaatagaacccagcacactattcccagaagtggagttggatataacccagcacatacaaatagcattttagattctcctcggccactcacctgcacaaagttcaacctaattttctatcaagttggataggcttaactttacaaaaaaaaaagttatgtttaactatgtgaagagttttgtttgcatgtgctgtgcatgtgaaggccagaggacagcctcagtcatatcttaagtatgccctctaccttgccgtgtgaggtagggtctctcaatggccggcagctcactgattaggggctatgttgtcaggccagaggtgctcctcttcagcgctaggcttagaaggcctatccccacacttggcttttccagatggtttctgggggagcaaacttgagtgctgtgcttaccaagctatttccttagtccctgcatttgctttacaccatcgtaaacactcaacacaataatgtggcctcaagtaacttatctaacttgagtattatttcttagcatgtaagatttatgtacgttgttgtggttttcatctatttatctcttttcgtttgaacaaaaaatatttgattgcccttatatgcctaaattttgataggtaggattttctggaagcatacaccaggctcaagactaacactgtcattgggaggcagctagatcctaatataacacagtaagaaggaagaaagaccttaaactaaaatgcaacattcctttatgttagtgaattgtgaccactagatggaattctcaagccagggaagattagaaagcccatgtcacagtgcatctccaacacctttcacttctgtttgtaatgaaaaacaggaagttaaaacaggggagaagaggtgaggggcagcctcaacatctctaccacagaacctcacaatgactatggcctgcaggtgaatcatgctttccctggctcagtgagcgcctggtgggctcactgtcctctcctgtcagttcctgggttgaaaagggttttgcacaatcatcacttgaagagtctgggtgagacggtgttttgcacaatcacttgaagatttaaaatccactccaagcaggagaggcacacggaaaatgttggggtcacactaccttcagctgtagcaccaggtccattctgtatttgccaagagggttgatgtcattcagaatcaaggcgatgatgatgtcaatgccatttgactcgtgagtggcgatacaggtctagaaaaggagatatctgtaaaacggcatgctattttgacacagcactagacgtggtcacagaagacttgaaactttcaaataccaggtacagacaatgttggacattttgattagtttttttgggggggagtggggtctatcaattgactggtactgggcacaaaatactaacacattgcgaaagacactaatctttgacacaaagaactgcagaattccaaagaggactgggtaacttaaaactcccccagtcactaatgcaaaatgagattctggaactgtgaattttaaggtgcaataaatataagaggacaagaaaaatgggattgtagatgaatttcacaaaactcggagcagatgtgacttcgtgtcctgggtggtgggaaagttcacagggtccttggacttgcatatttgtggagggaatgtggttgaacaaagtagaaaaacacccacgcagagagtgctgtgtgtgctctgagggtgaaaagccactgtgtgaggatttcaagctttgttctatggaagcagcatgaggacttctaagccacatgagcagcttgagaaactgacaccccagtgcgtcacacaagaaaggacagccccagccaataggacagcttggcctgggcatttgtgcagaggaaagctattcccatccaacactgacattatgtcctgaggcttctgctcatgggaacaccagccaaatggaccttccacacattttcagagcatgggggattatccaggtaggacttgttattttattatacatttttactgagaacttacttggtttcattaaggaatttcaaaacctaatttcattgttaaccacaaagtaaggaatgctcagtcacaaaatgggaaactactgatatatatgtgtgtgtgtgtgtgtgtgtgtgtgtgtgtgtgtgtgtgtgtgtgtgtgtgtgtgtgtgtaacattttctacaatagagagaattttatcaacaagaccaaactctgaatttctgtactgtgcattgactttgaatcagcagccaaggatgtctttgtcattgttgtaggaaactaaaatataatcttgaaaattagggggaaagatctgaaaatccttttagtgtcataaacacattacagagaaggaagtaataaccttacatgatcgacgtgtttccaccatatgaacccatggatgtatacatattgtgtgtgtgttcagacatatgtgtacacacagacatagtatgtgtgaggaaagtcatataatctacaatagaaaagctgaacttttcctttctacaccaaccactgatgtttagtgtcaatcgcaactttaaagtttatgtctagaaatgattgacatggagactccgccctaaaccttgcctgtgttggaggctccaagatgcttcatagatgctaaaaagctgtcaaaatgacatcatcccctttattcccttatatgttctgtcttctcccataacgtgtccttcaagtggagcaaggtactctgggagctggaggtgaacattgggtctctcacacatgcatatatagcatcaaaggggctcagaaagtactctgcagcttttttttctgcagctcgctgaaggcagcactctgagacactgcaaagtcaggtgagctctgggtcagaagccactgactgaaggacagtagcgagacccacttgataagctcgccaagcgtgtaacatgggtattagactagcttacctggtgtgtaacacaggtattagactagctcaccaagtgtgtaacatgggtattagactagttcattgagtgtgtaacacgggtattagtctagctcaatgagtgtctaacatgggtattagactagttcattgagtgtgtaacactggtattagtctagctcaatgagcgtgtagcatgagtattagactagctcacctggtgtgtgacacgggtatttgactagctcaatgagtgtgtaacatgggtattagattcctcccacactgcagtggagccaaagccacagtgagttaattccacacatctggagagattccctacagagagaaactgaacactgggaggaaatacaatcttgcccttcttttgataagtctttcatcttaaatattttcacgggaatcttctttcatgatgaaatttaaaatgtggcctaacatttgctagtctacaattccacctttgtatgttttgtgagagaagtggcaatgcctggcagagtgagcaggaaggcttcgaaggtacacaacgctggctctatgcctagcctggcacaccgtgactcacgtctcatgaagctctgcagtcatggttacctggttttcatggcacgggccctggcagtactccgtcaagctctccagggtctggttcaccaacgctacattcttctcattgatgtagagccccagcaggcccaggccgcctgtggtgcttccacaaatgcagtccagaaactgcagcgtctcacacacaagattgtagtttgttttgttgttctgattcctcaagaagttctggggggggatgaaagaaagtgcaactgagagacggaaagcaaaacacagaaaaaggggtgctggccatgctctctctctctctctctctctctctctctctgtgtgtgtgtgtgtgtgtgtgtgtgtgtgtgtgtgtgtgttactcaaaaagattcttgccagtatggaattcaattggtcttcacaagaaattggaacaccttggggaaagtggggggaccaacacaaaaggggagcaatcaggggacatactggtgtgactatgtctaagcaaacgatagggatgagactgtcataataaaactccttgtttttcagaggggaggaggcagagcggaggttggggggaggggactgggagaagaggaagcaggggaatccacagttgggatgtaaaataaataaataaaatttgaaaaacagactcattattttccaagctaatttgaaaactaagtaatatttaaatatcgatacgctaagttaagtttctcttaagagaggccctcaggttgtagtgtaagcaccttcagaacaggtcatagtaaacgctgctccactgccatcattttaagcctacagagggtggaagggagtgtgaaaagtagaaaggaaaaggagaacaaaatctgggggagggggtctaacttccaaacgaaccgtccctgacaaccgtgtcttcgctgtgcagggtccgtcaggccgtggtatgggaaacatgaagccctactaggcttctcagggaagagtcccacttgtgtggatgatcctaaatctgtgtagatatacacaaaagatcctcactgctcactgtctgttaggcgccagggccttatccctggcagcgtgatggttttgggatcttaggaagcacttccatatggatggatgggcgccaccaagaaataagcagtgtggcagtacatgaagttactaaattaaacagtcgagactacttaggtttacatgcaaagatcaccgtttgtacataggattttctggaagaaaacagtgttattagtgcactttggggaatacgctaaagaagagaaagaatggggaagagaggggatcttgtattttaatgtacttacagatatctatttgaatttgctttaactatttgttcttagtatcaaagtagccttatacattatctgaaccagcttctgtgagtggcacagtcagatatgacatcatctgctctgccgtctgtgacccacattggcagggcccgtaggttgcactgagcaagcaggcagcacacactgcagaagcttgacctaagcggtggcaggctggtccacatgagccacgctcgctcctcatgcattccagagcatctcatcgccacggacagcactttgtcttgcctttcggatcctctgcgttctagacaacagtgaacacatctcctcactctgcctctctctgtgtggacagatgctctgagaaccagattgcttagtgacattacaaggtaggagatcctaggcagaacctactgcagaaatctcagccagttctctgcaattcattaataaagatcatttgccagctacactagcttgcagcatggcaaagcgggctggcgtggtggccctgtgtctttcttggaagcagtctgccaaatggaagctcttcaggtgagcattctcaatctccctcagtcaggccagtcaagatagctcctttcgtgtgcctctgctatggcaccatgggcaacgtcatgcatacacataacgccagggaggtagtcaaagcctggagcagccctcgtccacccaccccgtctgacagaggaaatggcagtggtgggtggagatgttatggatgtgggctgcattaattagcaaagcaattttcactatcatagtaatgctttatatgactttgtttctaatgaaacgtaaaatatattcaatattgtgccaacaactacggattgggaacaatgtaaacacccgagtctaaaaccatgaactgcagacaaagatggccgtcctgaacaaacactgcagaggagagggaaggggctcagtggtgctataggatgtgtacatttgcttgttttttaatgcctaaacattttgactcttattttttcttccttaccatttcaacagggcactggtgtctttgttgattatttctccagaatcctctcctaaattcccttggatgactcacagtcacaggctacagagctcacccacagagagaagaggactcacctgtagctcccggttgtgattctcacacagtaactgcaggaacctgaggatgggctgcatgacggtgatggctgggctcatggtaatttcctcggcagacttttcctctgcactccccgcttctgggcctgggcacatcatgtctatctctgggtccatctctcgtctgtacacacagtaggctttggaggtggctgaggaggcctccgttagctgtcccttcattccctctttcaggtgaagtgatggatctctcactgaaaagcaagaagtagctggattttgaactaattttttttaactaccccacaataggaatccaaattttcccacagctgaattttaaaattatctaacaagatgtttaacggtttcctgggggggacacaacagctaaaaagttaatacagcaatctgaagaaaagctctttatatttaatcaattttagaattttctgactcataaatctatatcacaaagacacataagaatgtgtaaaaacacatacagatgacttcacaaggacataaccaaagggctggacaggtggtgtgttagttgcttttctatggctgtgcttaaacaccctgaccaaaagcaagctggggaggaaagggtttatttcatattgtgatagatatatcacaagatttcacacacacacacacacacacacacacacacacacacacacaggaactgaagcagaggtcatggagtgcttactggtttgctcagcctgctttattatagaacccagaacccaggaaggcactatccacagtgggctgatccctccaacatcaaccattaatccagaaaatgccccacagactcccctacaggtcattcttatggaggcatttcctcaattaagattccctcttctgcagggcattggtggcacatgcctttaatcccagcactcgtgaggcagaggcaggcggatctctgtgagtccaacgccagcctggtctctagagcgagtgtcatgatagctccaaagctacacagagaaaccctgtcttgaaaccccccctccaaaggaaggaaggaaggaaggaaggaaggaaggaaggaaggaaggaaggaaggaaggaaggaaggaaggaaggaaggaaagtatcccctcttcccagttatgtctagctatgtgtcaagttaaaacaaaaaacaaaaacaaaacaacaacaacaaaaaaaaggacagatagcttagcaggtaagagcccttgctgctcgaccagaggactgggttcagttcccagcacccatgtcaggctgctcctagccttctatagatccagtttctaggatcccacaccctcttctggtctctgtggacacccatacacacatgtggcacacacagaaagaacaagaatgtataaagaaacacatgtgtgtgcacacacctaagaattcctatagatctcataggagagaatgatcatttgcaaaatattaacacctccacaaattgtatttagctggcaatcatctggttatatcaaacgcaaacactttctgtcctcagagtttaatttccattcccagaaagtttgggatggttttcttactgaacagaacaaggaaatcaaacgtctttcatgttgcccattgcttccacaccaattaaactccattttagtttggtcctgcagagctagtctagggtcaagcccttaaccaaaatcctttaccgctggaagtccacactggaaacactgggaataattaaaccccagaagcaagatgacaaagctacatgagatttaaatgcttccttgctttcttctcccaggtattcaggaagctcctcacctctcatccgagggcctgaggccacgaggtcattgtcatcgtctctcttcttgctccctaagtctatggtgttgacagtcaccgtggatctgatctctttctgagcggccttcatccggtcataaaggactttgaagaatttttctgacttcttttgttcatgcaactgctggtagaaagaatactgcagagaaagcatagtttaaagtatcaatccctgaggcaagagaaatagtggtttactctgaaataaacacgtgcctgacagataaaaagcacagtgtgctaccttttatttattctacaaatggacaggctgtcagtgtctcattccacttaatacacactaatagcacatgtcattatattaataacagccagttttacttagcacctcccactaaattctaaccttttatattctatttgatatatcctcctgaatgtatgttttaattatgagtctagtaagttgtcatctaaagctgtgcattgattcaacacacatttattgaaagcctactatgtgtagggtcctatatttttgctacagacaaaacaaaaagaaaaaaatggcaagactcctacccacatgagtttgtaatccaaagtgaaacatgatcactcacttatgactaccccggacaaataagggctccctgttaggtgacaaagttatttttcttgatagtacatttaatttaggatgcgttaccataacaacttcactcacgggcacccactggtaaataggttttaagttgcttagctacttcttaagcaatgatgctctacgtgtagtttagggaaaattgactgaaaacaaactccagtttatcattaatgattcagggaggatttaagaccaaaagcgtggcaagaggtaccttcccggagagggaaatactgagctgcggttactcgtcaccgtgtgcttggtaactttatggaaggattcgtaagacttgacaggagatggaggaggggatgcagtccagaggagacacccctgagcaagtggaaccagccacacccccaaataaaatctaaagaggcaggttggtggggtctgacagctgtgcacatgttttcctacaggaatggccggagcggagccaggccctaccctagacagaactctaaagtctaggttacatgtgcagcatctacacacagtgagttttacacagccttcaagcatcagcttcatgtctgttaggggatgctcctaagcagagagctagcaactctacaggagcaggccaaaaaaaaaagaaaaaagaaaaaagaaaagaaaagaaaaagaaagccccactgtaaccatggcaacgacactgagacagtcaagctggttctgatggcttgcaggataaatgcagcatccacagacctttatggtcccacgaattaagctgatgcttgagctctaatctttgtaacgcagtctggctggaagggggaagggagggtgtaaaacgttagtaggaaagtcgcagagtcacggcaatgccacagctctgtgaggacaaagctgtcagggccccactcacacccaccctctcgaggacactgtcagcccctgtgatgagtacggtcttctcattccaggcacatggtattgattaaaaaaatgagatgctgtgaagcagagggatttgccacatgttatgtaatactcaatagcctgtatattatattttatttctatttctaacaaggccttactcaacagcccagggcagcctcaagtgatccttctggctcatcctctgggtatggagtgacccataatgcctagcttttatttctcttattattagtgtctgaagttgtaatttcttctatctgcctccaccaccccgcatctgatggagcatattgggcgcaggaagtgacttgtgtagaaagggaccagggattctctctggtctttaatacctggggggggggggggggtgggggagggggggaggggcactagtgactaaaggaaattaagaatattaaattcggggctggagggatggctcagtggttaggagcatttgttgctcttatagaggaccccgagttcagttgtcagcacgcacatggaatctcgcaaccatctgtaactccagcttcatgggatccaagttcctcttctggcctccacaggcactgcacatacgtggtgcacttacatacattcgggcactcaacatacacatgaatcttttttaaaaaaaaatgtaaaatccctgtggaactggagaagtctgggggagtgagtggtgagaatgagaatgccccatgagcgtgtgcgtttgcacgcgtggtccccagccagcgacactgttggtaaggttatggaacttttagaatttgaagcctttctagagagagtatgtcaatgaggtcgagggactttgagggtctccagccccaccacactgccaggttcctctctctgcttcctttgtgtggacggagatgtgacctctccccctcctgctccagccacctgctgccaggcctctctaattattgtgaactgacccttgggagccataagcaaagcaagtttttccttctatgagctgctttgtcgtggtgctttatcccagcaacaaatagtaactaacatagtggggacacatctgagtcactaaaggggagaggtagattcagcaggtctgatctagacctcttaaagccacggcatacagctgacatctagggacattctgatgacatcatgaggtccctaaatcagagacctaagcagcagaacctacagagtcaggtttccttaagcaacaaggggattttcatgcacagacttgaattaatggtgtttcttcaacagttctgtgtgacttttgttttctttttctttagattgaagccatggcctcggaaatgctacacacatgcttactactgagctacaggcccagctctccttttacttttaagcttaagacctgctttcactaagttcaccagaccagccttgagcttgctccttagctcaggtttcccttgaacttgtggtcctctggactcagcctcctgagcagttgggattacagatttgtatcaccagccagtgtgtgtgtgtgtgtgtgtgtgtgtgtgtgtgtggggggggggggggggggggggggggggggggggggggggtgtgtgtgtgtgtgtgtggtggtggtggtggtggtgtgtgtgtgtgtgtgtgtatgtgtgtgttcatgtgtgtgtatgtgtctgtacgtgtgtgtgtgtatgttcgtgtgtgtttgtgtgtgtgtgtgtgtgtgtggtgtatggtttagggaggtgatatgtattgaacagctataaaagactatgaaaataaaaagtaggctataaccctctacaaatattagaaaattaactggagagacataatgtaagacagacaataaaataaaggaacacagagagggctccaagtgagaaacaagtgcagtgaggctcgccagggagcagctgccacttgcccagctagaagagaaggcttcatcacaaccaatttctcatcagcatatccaccactgaatagttactgggcattagcgctccaaacacaaacagcaaagcaatgaagatgtgttccaaaccttcaggaatggaatctggggacacctggagaggtgctgtgacatgatagaaacactacccaaagcaccaggaagtcacagcaaggtcatgcagtaactggcagtcagctctgcccagtgagacaagggcctgaaagcgattctgagagaagcactgacgggacagacagaatgacagatagcctgagcatatgagggacctgcatcaggaagtannnnnnnnnnnnnnnnnnnnnnnnnnnnnnnnnnnnnnnnnnnnnnnnnnnnnnnnnnnnnnngggttataacatagtgttattaaaaaatgtcactggaggcaacgaaaagaacgttagagggaaggcaaaaaggaagctgggaaacttggtccccgtggagcgaacggtaaggagttgtgacgatggcttgagaagcagggattgaagagttagggatagaagcgatatcagaagggcagaatcacccaggtttgtcatcaagggatgaccaacaaggagacagggtgaccagtcagtcaaaagtgacaaccagaaggcacggtgccagtcacacgaggctggaagagaagctgggggcagcggccagggggagttgcagggtccaggtagtaaaggttacagaacaaacaatttcccagtgatcaggactacagaaacataaggcaaatgaagactgaagactggatctcgggagcaacgctctggcatttaataagtggagcctggagttctcctggagctagcccgcaccatcggcacccatgtgaggatgaagagcgttcccctgggatgaccctctgcagcccagggaaatgtagaaagtgcagctgggtgactgttgctagagatgccagttcaagccagttcacaccggtgctacactgctgccttttttgctgtctcttcagcctttgtccccaaagccctgctatcaaaccggtctctcatacagaaaagctcctgttgttaaatgtaccggtaacaaattaaagcaaaataccccagttttgaatctgactgggcttctgcctgccgctcctggggccaataggtttggggatttctagccatctggggctatgcattgcttcatggcttaggaagatataggaaggtcagtgagccaggaagttcagaagtgctccctgggaagtttccagagcccgggctcgtgcagcacactgttgggtgcaaaggagccaagaggaacctggcaggggtcgccaagggacaggagtgcagctggacagtgtcatgtccttggtacgcacatacacagcacctaccaccactgtagagcatgtgacacagcgcccactgccaccgtagagtgcgtgacacagagccctctgccactgtggagtggctcctgatgcagaatgagcttcaaacgatgttctgattagagcaagggggaagccctatcatttcaatagcaaatcacataaatttataagggaaatgtgatttgtgagttctttcattttgtttgagccagcaaggggaagctaaaaggatacgtttccctggttcctttaaccagtgatcaagaaacaggaaagactataggagttggaggtcagggaggaccagagcaaaaacaggaccacagcacccatgagctcacagcggttgtggctggccgcacgcggccaaaccaggggggggtccagggagcaaggttgtgtgccctcaaccctggctgggatctgtgggtgtgatctggctgctggggcaggagagttagttttctttaaggggtggctcctgataggttaaccaagctccagaagacggctcggcacacagggtatctgagcagcacaaactgtcatccaaagtttactggtttggcagggggagaagacacaaagttagggggggttggggggcggagtggatagtgaagagttagagagaggagtggaaacaggagatgtgaacattgtatgaaattctcaaaaacaaaagtattctttaaaaatatatagaaatcacaacccgaacagcactagcaacagacgagcacctgggtctgtgtgtttcctccttccagcaaggcgatgccaagcaaaatgccttcggagaaaatcctgtcatttttggtgttcactatgacatcgatgacaagttcggatgctccttctttgtccagcagacactggatgtcagacatggaaatccccatcttgtccgagtcctgtccagagaagcctcctgtggtcggggaagagaaacacagaacagcaactcgaacttcagcacagacattgtttttagcagcaaacagtgttttcaaattcttaaaccataacaacatgagccacaggagagtttagttacaaatataaaaaatctacaaagatggaactcttaaacatccaacatgcaattcaatgtcaccaactgtcattcctttaagtactctagaaagagctgcagaggtggctcggtggttaagagcactggttgctcttgcaggggacctgggtttgattccagcaccacttggtggctcacaaccatttgtaattccaattcaagggactccaatggtcaccaggcacacatgtggtgtgcagacacacatggcaggcactcatacatatgtataagataaaaataaataaatctctataaaaatattctacaaattttgtctttaatacgtgcatgaagaaattgtgaggaaaccacccagaatcaaagacaaaatccacgataatgctcaacctatggatggattcatgaaccccaactacacaaacatttcactcgtgttttacgtgaatattttacacttggatcatcactgccatgaagcagcactgccatgaagataatgccgtgagaccctaaaatgggtggaagaacacgtacctcccacttgtgctgtcttggcataggcccctgacagaggtccattggcaccaacgccatggtcacctttgaagtagcggttcaagaggattttccggagtatgctaccctggaaaaggagagctgtcatcatttttaaaaatacaagtaaagaaggctgacagctaaatgcaaatgtatctgaagcaaaaacgtgaaaaaaaataatttgacgccagatcagtattttccgagggaaaactgcaaaggtcccagtaacggtaatcaattttataatcatgaagtgagtgatcatgaggtcccctcatcccagaagtcaacaagctgtacacaattaacacatgctgactggagagccgtagagctggctcagtgggtgagggaactttctgtctagtctgaagacacgagttcaaaccctgggatgcactctgtagaaggggaaacctgacctgactcctgaaagttgtcttctgacttctacgtgcatgctgtggtatgcacatgcacacacacacaacaaataaataacataagccagttatacatgtatgaatgcatgcatgtatgtatatatgtatgtgtgtatgtacacatttatatttagagccagggagatgacttagtgggtggaagctcttgagccaagtctgacaacctgagcttaatccctgggacgcacgaacacagtagaaggaaagaaccaactcctacacacatgtgctgtgtcgtgaacatgaccccccaaacatacacacacacattaaatcagtgtaataaacatgagtttgctcaatgggaaaagctgggggttctagtgctgagaatatagtgcccagagaagataacagacaccctaaggactgaaggctgaagcctcagagctgggaatacagctcgtgctcagaacattaaacttgacaaaataaagtggactctatggctgggttctatacagacagcaggcaaaggacagtatatgtcttcataaatggactttttaaaatcctgtcttccacactttaaaacaaggaggaggaggaaaaggagacgaggggtacaaatagggaagggggaggagaaaaacaaaataccatgtttctctcacatagggaatccagaatcaaatacatacatctattatacatatacacgcgtgcacatacgtgcacatatgaaaatagatgaggggctattagcgggtgggaggacctgtgagagggggcagcagggacgtgtagagaggagggtgggggctacgaacaaagtagaacaataaatgcatataaaatgtcctaggaaagccattatagtctatgctaactggaaattacttgaaaaggtaaatatacttgctctcctgcctgcagctgctgacactagccctgctcctgaggtggtaccccatatttcagggaagaaacctgagacacagttcacaggcctcaagcagggatgcactcttgtgtctataaaccccaggcatgtccaggtgcctgctccacgattccctagtgttttccatatgtcccgcccctccaaatctcacaggatcctctccagtgctgtgacatctgactcctagaacctaggggcttgcccctgggtcctgatgttggtctatcccctcccccttcctgtccccctccccctccctctctccatctgcagtggcttctctttttctggatttcttgtctctgtcttgcactggcacgggaaactcagaatggaacattccttctctcttgaatctgttttcctctctgcattgagtcattgtaagagcaacaccgtcaccccggctgctcgctgacaatggcttctgaatcctacctttgcatgggagctcctgggtgcctttgatgctatatttgaaccaaactaaggtatgttttctgcatcttcctgtttgtgtaaggacaaggcttgtcttccctctccggtctccatgctgcccgggagctactccttcaggcaccattccaagtgaagaggtagaagcttcctggatgtcaatttgattaaacttagggtcaccatggcaacacacctctaggtgtgcccatgagagtgtttccaggaagtttgactggggaaggaagaccttccttattgggaacagaaccatctcatggattggggtctcagaattaatcaaaaggaaaaggcattcatctccctctgcttcttgcctatagatgtgatgtcacttgtcactagagccctcacactcacacttgtgaaccacatcttccctgccaccaagcctgcaccctcagagtgagtcacaacagactttcccaaccttgagttgcttttgttgagtatttcatcacatcaaagagtaaagtaaccaacacagcgttaaagagtttacagtgagatgggctccttcactgttatgtgtgaggctctggaggctccagaagcccttaaaggagggaggctgaccccagcaggctgtgcaagtcacacacacccatgatcttgcccagtgagcaacagaatgccctcggtgttactgcgctgagaacttcatggactctgtgcctgcaattgttcatttttgcaatgacattttattgatgcttttattcttggagcacagactgtcactgcttctcatcttgtgttttctccctctaacaccttttcatgtaaggctgcagtacataaaagtaatgccaaggcttagaagagactaggggagggagagctgacttccccatggatgtacctccgctgtcctctattagacctacagaacccaagggctcagcgatggagagggaaggctgctcttgcaaaggacctggattcagttcccagcacccattcatgtcaggtagttcatggctccagggcattggagggatgatggggaaagtccaagtgtctctgtatactcatttggggctgaagcagtgggacctggtgggacaagagaatctccacaacagaggaaaactgcactaatgtacacacacacacacacacacacacacacacacacacacatgcacacacactcacacacacacacacaccacacacacacattattgaaagtagatcttttaaaaaaccacccaaggagcccaaggatgctcttagctaaaaataagcattacttcctctgttctttcttttaaggaagggtcccttaaaagaaactatctctgtctctctaatgaactattctccaaaaccagggacaaacatgtctttggtttgtctctcaatggcaggaggtgaggccatgagagttttgggactcactactgggactgaagtcatcagagagacctggaagcctgaggcctgtggtcttgctgccaccgccaccccgttactgctgccgctgctgttctgagacagtctcactctagggcccagtatggccttcaactcattgcaatcctcctgcctctgcctgcagagtgctggggttccacatgcaccaccatgcccagaaaacactgatttaagagtcgccctgcctgtcatgaacactattcatgtctctcctacacacactggttggcataaccccacaagacaagctggggtgcctataaggactgaggaagataggagttgaagcaagctctcttcttgagcagtcagtgttggtgtccacaaagaacctgtcgtgagtcaagtctggatcctgtgagtcggtttctgttaagaagctgtcattcacaccttcaatatatttccccaaaattccaaccaagaaaaaaaaatcacccttctactgcaggcaggaggaagaggaagagaaataatagatttgtgaagagagacccatagacttagtacatgggaggccaaagcaggaggattgtcatgaaggagaggccagccagcactacagagtgagttccaggaacccgagttacagagtgagtgagagaccttgccagaaataaagccaaaaatgttttaacactatattattgcttttttttttaaaaaaagcatcccttataggttaagaagaataaagtatttttaaaatccagagcagaacagctacatcacgctaaaataatgattatatttgccaacactgtaaaaccctcttaggcaggtaaaacaggctggtaagcaccagtcaccaagaaagcctccttcacgggtccacagcactcaggaggtccacggtgcatttcccgacaaatatcagaatgtcacagaatggggaagacagcgattgagcctcctatggacccacagtgcccaggttcaaatgtccctgcgtgctgtattaaccaggggatctcacacaagctacctcaccaccctgagcctcagccctcagctgtcaaatgaagcagtagttgacccttcttcctgtggcttctgtgatcggcatagttcccagtgtggactaagggcggacacaaagtcaatgagcaaagtcaatggcatccctgccgtgttaacacggccgagcacacagaagcacagggctttgcactgatgtacatttcctgagctcacaccaaactttcctacagaagtgaaaagtttatattgagaagagggaaaaaattatcaactatctcaaaaccctagcttttccctgttaatcatagtgagtgaatacagaaaagtcagtccaaagcatgtacatactgttgtaatttttaaaaagcgactcaagagagagagacaccatgtgacaaatcaagagcagggtttttttattaagggaaaaggattgcaaaaggggaaaagaggaggggtgagactggcctctaggaccaggagcagagggagagaggaaagagacagagagagagagagagagagagagagagagagagggagggatggagggacggagagagggaggtgggcagggcccttttaaaagggaacaatagtgaatgtgcacagaaatcctgtcagaactccaaaggcgggccaggacaggtgcctaaatacgaatgcatacatcactatagaaaatatctccataatttcaaataaagtggaaataaatctatcttggtttgaaggccagtttttagctaaggcagtcatccctacttcatcatggtagacaagtaaaccacaagtgctggcacacgctggcgtcatttatcaaatcctggtcctccagaggcaagtgctgcgccgcagtttgccatggccatccgtggtctgttctctctctggcagggaacagagtcaggagcttcagtgtgagacatgtccctaaatccctttaagccaaataaaataattgtagaatctgtcagatagtctggtgcaagggttgttaaatcctttccaagctataactgccacggcagagagtaaggacagaactaaacgtacaaaatgccattttaaaaataatcccacgggggctgagctgcgtgacctctgtgctgggtcttcctctgcgggcctcccacagaaggttctgggctaggcccactcactagcaaggactgtcctctgtggctgtctttctgtcagaggcaactccaggccacaagacacatattccagccaacatcttcacaggaacacattccagatgtgcgaactgttaatggagccaagaaaactgcaaccaccttctgaaattacaacaaaatgtctccataaaaagtcatgtccatgtccggaagaggcgtgccagcagtatgtggacacatgggaagatggccgggtctctttgatttcctggccactccctgctatgttaggccgagtccaaggtatcagaaatcaagcagcccagaagcggctggctttggtggacagaatggagaaaaataagcatttatcctagaaaagtataaaggctttcactcactttgaaaaacagtgcactgtttgacgttttagacatgaaaggctatgaggtgagagtctgagggtgttcccaagcccttaaagagtgaacggatgcatgttccccattagaaggaatctaaccaagacttcattaaacaaaaaacaccatatgccaacgtcctcaaactctaatccttcaactggcaaagacatttgacttggggttcccattaatgatgacatcatcgactcgtcagcttgggtagacctggaagcatcctgacagccagggaaagacaacctctaaagatgaaatgcccttttctgagcaaactactccaggcttgagtgcggccccagcagctgcatttcaccctccattccccaaaactccaggcatcccctcccgcctttgcaggcactcccttgcccttgacagagtgtctgccactggctgttttgaaatagacagtcccatctgttgaggtcagactggtcttttgctgcccaatgtctctttaagctgcctcggaaatctaaccaaagtggccaatggcagcctgtgttcatatgccaatgtggaattcctaggggtgactgctaagcttccagagtatgcagctagaagggttcggaggtccaaaatgaccttgtacatggcaggaccccaaggcccagggaggaagtgggaacaaagaaggaactggcaatgacctgacggcaggcctcttcctcttgaactggggaaagtcaccacctagtgctttaaaggtgcccacgggaccaggtggggagcacggggttgccaaggactcatcagggcatggccaccccattggaacatttaataggcacccagtgtttcctataagaaaaggaagtgtaaggagcttttcccacaagacaggcaagagcagctggctttctcatactagttcaagggaagtcccaactgtcttctggagaattcctctgcatacatcactcacacaggttgtttttaggatgctaatgacacatcaaattggcttcagagaaatctcgttcatgctaattcccatttcccttctattagacggtgtggtggttgggacagtgaacctccagctatggttcctgagtacagacagacacactggccttccctgagacctggcaggacagggagaaaggagctgtagataaaaggggccagaggctccacctcactctctttttttcctgttctgtcttcctggagtacaagccatgagctgcaggctgtggtctgtatgtgcagccagggaagaacggctggccaggttgtgagatctcatggctcaggagagttatccaagaaaacagggtggcaggagcacaccacacaccccacccataagcactgtctacaccctaacacatcccctacactcacatccacacatcctaacacacaccgcactcacatgtacataacaccgtcacacattcagacatgtgcacacacaccaccacctccattcacagacactgagaaacacgcacacacacacacacacacacacacacacacacacaccagcacatttatagaccacaccannnnnnnnnnnnnnnnnnnnnnnnnnnnnnnnnnnnnnnnnnnnnnnnnnnnnnnnnnnnnnnnnnnnnnnnnnnnnnnnnnnnnnnnnnnnnnnnnnnnnnnnnnnnnnnnnnnnnnnnnnnnnnnnnnnnnnnnnnnnnnnnnnnnnnnnnnnnnnnnnnnnnnnnnnnnnnnnnnnnnnnnnnnnnnnnnnnnnnnnnnnnnnnnnnnnnnnnnnnnnnnnnnnnnnnnnnnnnnnnnnnnnnnnnnnnnnnnnnnnnnnnnnnnnnnnnnnnnnnnnnnnnnnnnnnnnnnnnnnnnnnnnnnnnnnnnnnnnnnnnnnnnnnnnnnnnnnnnnnnnnnnnnnnnnnnnnnnnnnnnnnnnnnnnnnnnnnnnnnnnnnnnnnnnnnnnnnnnnnnnnnnnnnnnnnnnnnnnnnnnnnnnnnnnnnnnnnnnnnnnnnnnnnnnnnnnnnnnnnnnnnnnnnnnnnnnnnnnnnnnnnnnnnnnnnnnnnnnnnnnnnnnnnnnnnnnnnnnnnnnnnnnnnnnnnnnnnnnnnnnnnnnnnnnnnnnnnnnnnnnnnnnnnnnnnnnnnnnnnnnnnnnnnnnnnnnnnnnnnnnnnnnnnnnnnnnnnnnnnnnnnnnnnnnnnnnnnnnnnnnnnnnnnnnnnnnnnnnnnnnnnnnnnnnnnnnnnnnnnnnnnnnnnnnnnnnnnnnnnnnnnnnnnnnnnnnnnnnnnnnnnnnnnnnnnnnnnnnnnnnnnnnnnnnnnnnnnnnnnnnnnnnnnnnnnnnnnnnnnnnnnnnnnnnnnnnnnnnnnnnnnnnnnnnnnnnnnnnnnnnnnnnnnnnnnnnnnnnnnnnnnnnnnnnnnnnnnnnnnnnnnnnnnnnnnnnnnnnnnnnnnnnnnnnnnnnnnnnnnnnnnnnnnnnnnnnnnnnnnnnnnnnnnnnnnnnnnnnnnnnnnnnnnnnnnnnnnnnnnnnnnnnnnnnnnnnnnnnnnnnnnnnnnnnnnnnnnnnnnnnnnnnnnnnnnnnnnnnnnnnnnnnnnnnnnnnnnnnnnnnnnnnnnnnnnnnnnnnnnnnnnnnnnnnnnnnnnnnnnnnnnnnnnnnnnnnnnnnnnnnnnnnnnnnnnnnnnnnnnnnnnnnnnnnnnnnnnnnnnnnnnnnnnnnnnnnnnnnnnnnnnnnnnnnnnnnnnnnnnnnnnnnnnnnnnnnnnnnnnnnnnnnnnnnnnnnnnnnnnnnnnnnnnnnnnnnnnnnnnnnnnnnnnnnnnnnnnnnnnnnnnnnnnnnnnnnnnnnnnnnnnnnnnnnnnnnnnnnnnnnnnnnnnnnnnnnnnnnnnnnnnnnnnnnnnnnnnnnnnnnnnnnnnnnnnnnnnnnnnnnnnnnnnnnnnnnnnnnnnnnnnnnnnnnnnnnnnnnnnnnnnnnnnnnnnnnnnnnnnnnnnnnnnnnnnnnnnnnnnnnnnnnnnnnnnnnnnnnnnnnnnnnnnnnnnnnnnnnnnnnnnnnnnnnnnnnnnnnnnnnnnnnnnnnnnnnnnnnnnnnnnnnnnnnnnnnnnnnnnnnnnnnnnnnnnnnnnnnnnnnnnnnnnnnnnnnnnnnnnnnnnnnnnnnnnnnnnnnnnnnnnnnnnnnnnnnnnnnnnnnnnnnnnnnnnnnnnnnnnnnnnnnnnnnnnnnnnnnnnnnnnnnnnnnnnnnnnnnnnnnnnnnnnnnnnnnnnnnnnnnnnnnnnnnnnnnnnnnnnnnnnnnnnnnnnnnnnnnnnnnnnnnnnnnnnnnnnnnnnnnnnnnnnnnnnnnnnnnnnnnnnnnnnnnnnnnnnnnnnnnnnnnnnnnnnnnnnnnnnnnnnnnnnnnnnnnnnnnnnnnnnnnnnnnnnnnnnnnnnnnnnnnnnnnnnnnnnnnnnnnnnnnnnnnnnnnnnnnnnnnnnnnnnnnnnnnnnnnnnnnnnnnnnnnnnnnnnnnnnnnnnnnnnnnnnnnnnnnnnnnnnnnnnnnnnnnnnnnnnnnnnnnnnnnnnnnnnnnnnnnnnnnnnnnnnnnnnnnnnnnnnnncacacccccacatacatagaccacaccacacacacacacacacacacacacacacacacacacacacaccatcacatacacacatcgtacatatacaacacacaccatacacccatacataccgatgtgcacaagaatgagaaacaactcatcataccccaacactaagaacaaactgaacttcgcacccaggagcaaagcaacagttgaatacctgtcaatcaatgcaaatgtttgacaaaggaaacaggaagctaaattttaataaattcaggttaaatttagaatttttcatgtagaagagaaataatcgtggagtctatgaaatgaagaactctgcatagatcaacttcaaaggaagttcttgagaattaagaacacacacacgcacacacacacacacacacacacggtccagcccaggcccttcatcttgggagacccacctgagctgcaaggtcacacacatgatggaaattgctgattctgtgtggacctccccacctggctcaggtctgggtttagctacatactagcactgtgactcaagaattctactgacctgtcctgagacccagttacagatactgtgcatgataatatccaaacctcagtattatttaaagattgggggttatatatgtgagaaacattgtgcctttggctacatcaagttctaagcagacagctcctgagcattctctttaatggttaaagaaaagcaagcttttgtccagggaagtgatgagggtatggacatcagaatgcctgggccacagagacaggcgccgttccagttgctgcataaaaaccactctacatatccacgtatctctaagggaagacaaatcagaggcagtactaaaagtcttgttctcatctctatgcctgcttgttcacccagccctatcctcccctgcacactcacacagccctttgctcccctgcatactcacccagccctatccacccctgctgtgctatcaactggcccaggattttcaccttgctaaaaagcacaggcccatcttgaggttctgatttcccaaactaacaactcaatgtcacgtgaatctgtgagtgtaatgagacagacagccactgttctcctaaaatgctgttctaaaagaaaatattcttaatgcaatctgtcaacccatgtgattctcaaagtaaaaactgttgcatttcttgcaagtctgtattatacaactatagtgtttttaatactgtatgaatcatgttgatctaactttggtaatttttgtttttatctttaagacagaatcttgctatgtagcctgatctcaacctgagtgttacaggcatgaagtgttaataatttcctacattaatttgctcctaagagcatacgttttcctgttaatatgaatagtccatgctctcgtgagctcctgattgtgttctgtgtagaaagcatgacttttgaaaaactccacagcaaaaacacagacaaggatgaggaggaataaacaacagggttctcacatatctaacaacatcttaaaacacagacacggttactgcctggagaaaatgagatctcagttcaaataaacagaacaatgccaccgcccaagcactgctggctgcccgcctcaggacggagcttgttcagaacttgggctaggtgcctcccgggcttttgaacagtactgaaaatcatcttgactctgtgtcacacattatgccatgacaggtattttactaccgtatctagaacagtaactaaaatgctaaaataggtgaaaccttctcttatgtttctgtgtctgtgcatatggtctgtgtgatgctcacacctatgtgggcgtgtgtgtgtgtgtgtgtgtgtgtgtgcgcgcgcgcgtgtgtaggggtgctgtgtgtgagcatgcatgtgtgtggaagcctgagcttgacattaggtgtgtctccataacccttgctctccgtcttgtgtgtgaggcagaggctctcactgaagtttatgttttcgttttctggggtctgcttagccagcctggtctgaggagtccgtggctctacctcccaggagcgggactgcaggtggcccacatgcctgcctggctttgccacgagtttgggatgcaaactcaggccttcacaattgcatggcaagagctttatccaccaagccaggccccagtcctgagactttatttacttttaacaacagccagtgcacagcacacacgctgttggggaccgcagctgcaacctccccaacctccccagttgcatcaaacacgtgatcgtcacaggcttttgaaatcagtttctacctgaaacatgaacactattcacaggctaagaaaactcaaaccaagtgtgactggaggtgagtgagccatttgaggataatgtcagtctgtcgaggctgagccgacacattacctcctccctccttttctgtctctagtatgtgtggatgtatatatcatacagatacacagatgctcccaatatgggctgagagtgcacgtatgtgtacagggtggtgatgaactcaatgcagcattaagatcccacggtgcacgggaggctgtgctgccgtgtgtcattagctgtagcacacaccttttcctcaacactgaccttcaccaactacaggtcactttaaagtcaacagtgtgctacagactctggaagccttgatttgctttttagtgatacgagaggttttggtcttacacctgataaaatatattgagtgaaacatcagggtcatttgttcaatcctgggagctaggattgaacccaggaccttacacacgctaggcaagcactctatcacctagctgcatccctgtctgaaggtctttggcccagcgtcactgtgcttcacactccatgacaccactgtatgatgccactgtatggcccatttggctaatgtaagatgaaattataccaggaacctgaagattttaccttttattcaaacagtgcttagagactttcctctttctacactacaggcctaccaaatagtccaactcccagaatcatcgtttttttttttttttttttttttaacgtcatcttccctgagttgggtttgtgttaaaatcagaaaagaaaataacattgtagatatacacaagaagtgcatttccctcaactctccagagtaatggaaacataaataagaagcatttaactggtttgtgaactagatattgatttcttttaaaaaaaaaaatgcccctggatagccttcatatccactaggatggttaagatttacaaggtaacaatgcagcacacagtcaaggatgtggacaaattacgaacctcataacttatgggtcagatacaaaatagagcagccatgcggaggaactatgtcacggtccccacacattaaacacagagttatgtttgtacccagggacctcactccttagcacatgaccaaggggaaaaaaaaaaaaaaacttgggtattgtggtgatattttgtttaagagaaacaaatcggccagccactagagagttctcacctctgccgatgagcagaacgaaggggcgatccaccaaacctcagactcattctgctcctgtcttctcccgccttatattcctctttagtgctgggattaaaggccagggatccggtgtgctgagatcacctgtgtttctctttgagacggattcattctcatgtagccctgggtggccttgaacccacagagatccatctgcctctgtctcctgagtcctgggattaaaggtgtgtgtcaccactgcccagcttctgtgactgactagtgtggctggccttgcgctctgattttcaggcaagttttatttgttagatcataaacaaaatgtcaccacagggtatggttcacatctatagttcccatgctcaagagggctgaggcaaaggaattggtagcttgaggccagcctgaactacataatgaaacttgatctcaaaaaagaatttcacacaaaaacctggtatggaaatgtccatagcagaagcagcagcattcctaacagtcaaagagcagaaagcaccccaaatggccacggaatgatgagtaggcgagtagcatgcactataagcataccatggtgtgttatttctcaataaaaaggcccagagtactaacacaagcctccccatggctaagccctgagaacagcacaggaacaatgagaaaaaacttagaaaaaaaaaaaacatatcgggaacaggagaattcacaaagattcgtacaaagtagacagctggcttccaggagctggtgctgtaaagactgggagagagggagaaaaactaactcctgaattgtacattctggtgggacaaatttatgacacgagtatctcaataaagcagttataaaaatagaaaataagtccactagcctagttaaggaaaattacttttttcttttaacttaaggggaaataatgctgcctctgcccagatttttgccaagcagctgagctgtggtgtgtgaccatgcctcctctctgaggcacatctggctaacagctgcatgaggatggccaacgttctaaatgccacatctgctggtaaagtgtagtgagactcgtactgctaattaaatatggaattgcatgtgccaattaggaaccggccacttgggagagcacaataatctgagctgggggctggcactgctcgcttcctgacctgtgtgggaagacagtccatggctctgaagacaggcgaggcagtttctatggaaacctcacacacccagaggagaaactcaaaatcatacacaactttgtggaaatcgggctttgcaaaatatttatttttaagcgtaaaaacaaaacaaaacaaaacaaaaaaccctcatcttcttgaagatgcctgacttcctttcatcggttagtaggtaaggtttggaggaggtaggaaaagccggatctcagatcagggatgtccgtttaggactcgtgtcagaaggagggacatttgaaacatatctttcatcataagtttaatgcgaacctcaagggcttaaagatattcagcttttattgaaaccaactgcagagaattattccagctgagattaattaatcctcccactgcatgctaatatgctagtctttccaaataaacgcacactgtaattacacccaggctcctccgcccacggcccgctgttccttcccatgaaataggacgacatgtcttccagatgtggcgtacaagcaacagcagtcttcgccaagagtttcagaattaaacaaagcatgagacaaacatgtgtagcttccctaagaatggagacacttcccacacctcagacctgaccagcctgtcgatttacatctccaggagtttggaagactgtgtgatggcacatacctttcatcccagcactaaggaggctgaggcgggatgaccatcaggagctggagaccagcttaggctacagagttcaaggccagcctgggctacatagcaagacactgtaacagaaactataacaataacaaagatgcttagaggaggaaaaagacatcagctgactatgacatcagcttcatccatgtccccaaatcctgacatcagcttcatccatgaccccaaatccactaccaaacaagtcataaaacggcaaaggcagtgagccgcacaggaagccagtggggttctttgtatctctcagtctagacattgtagagagaccagcaagggcaagatgagaattaaagttctaatcaaattaaatgaacactgcactgtgtaccagaagcatgtcacagatattctctcatgtgacacgcacaggaagccaacaacttgcttagcagcaagaaccaactgtgttgttgttcagtgtgcatgtatatgtgtgtgtatgtgtgcatacatacatttatgtgcagtacacgtgtgcatgtgtgaacatgcatgtgggggcagaggttgatgtcatgtgtcatcctcagtcatttccccactgtatttgttttgagacaaggtcttctatgaccctggagttagcagactcagataggccggctgactagcaagactcaggaactgtcctgtctctgacctcccagcaccgggattacaggtcacaccatcacccctggcattttgtgtgggtgctggggattatgggagctaaggtccttgtgttagcagggcaagctcttcaccgacccagccatcttttgagccatgtattgtttccttcccaactatttgttttttaagaacacagcttattttcatttcatatgaaatgaagacaactgtgagggcggccatcagaaaatgttcacatgaagtgctgagagcagagcttggtaaatgttcacaaaaaaacagctcagcctagagaacacctaacagcacggacatcaccccatgccagcatccttccctgcagtgacctgctgtcccccggctggctcaccactctctttctttccctgctgcccttctgcccctgggtgtccagcctctcagaggaagaggactttcaactgacaccaccatcacagggtggtcacggccgagcagcagctgttccttatcgtgtcacgccaattcttccggacactcctttctagccttatcccatgttacacacccgtctaacactctgaacttttcccctggagtaattaaagcattcaatccctctccaaatatttggttcatgactattttctcactaaactctgagggtgtaattaattgcttgccagtgcgtctctgggactgagtagtagacagtcggtactttttgtctaagcgtgtctcgttcaacttttctatttccaatcctttctgtacacttccactttcagggttcataattaaacgttgttttcagaactcagaaaagccgggccatgcactggttcttgtgtctctgatgaagtcagtgcagtctgtggctttgacactgggaatgaatccatggttacctcttcgcctcccctgccctctgcctcatttcccaagtcagacctcccagccagcagaggattttagctctaagcctctgcgcagacactcacaaggcctcatgggttatgagagtcacttggagcctgcacctgaaagggctctgcttccatcagaatagagactccttaggacgcacatgctcctagtctaacctctggggagaagttgaggggagcttttcttcccaggcaacgtgagtatcgaaaagaccaccaaaccttatcctgcatttgtcaatagtacagaagatgactctcagctttactgccagccgaggcttgccaaggctaggcttcccccatacgaaggagacagagcaaaccaggtggggccacctggtgcattgctgatcttaccaccaggtggggccaccaccttcgaatacagtaacctgaagaaagcaggggtatcctgagtctggcccatatcaggaccacagagcagccccagacagcacagggtgtggggtgggagaagcgaaggcccctcattagtatagctaggggtccagcctccgcctcggagccgtgctgctgtgtgaactgtgattcatcaactagcaagtaaatttcagttgggctcttagcattgtcagttttcacggaaaaggcttccaacacgctggcgtgtttcaaaagacaaaaaaggaaatgggagggagggaagggcaatggtggacactttgggtcagggtttgtatcagctgagtctcacacacaaaggacgaagaagcactcacacacagctgcctcctctaatgaagccctggtagtgattcacaggaatattcatggcagtcgtatttctaatcccgaaagaaatccatacaagaagacatttctctgtactggatcaatcaagtcccaacctggctctaagcaaagataattatcggaaagtaaattgttatgtttcgtctgacggcctgttgcctggcacatgtttcttccagggctgtctggaaataacagtacactgggccatcctgggtgacttatgtaaccaatgttattatctgagagctttcagcctcaggagctgccactgtgtgcagcctacctactgagtgcagcccacctactgtgtgcagctcacctactatgtacagcccaccaaaggagcttgggttccacctcatctatttctttctgctactaagaaactatgtcttaacaggaaaattaattttaaagcaatctttagccacagcttctttaaatgtggttattgacaacacatagaaaagaatatggtttggaaaataattggaattgtttttgctggttttactgggtaaaactattgttaatggagacagagggattgctcgccggttaagagcactggcttctctcctagaggaccagagttcaacccccagcacccacaagacagttcacaaacatctgtaactccagtcccagggaatctgacaccctcttctggccatcacaggcactgcaggcacatggtgcgcagacatacatgcaggccaaacataaaataaaaataaataaatcactcttaaatgatgctgtcatcacccctagagcaatatcactatgcagaacaaaagcaaagcaaaaaggcaaaaacccaaccaaaaaacataattaaggaagggatggtaaaaatattaggaaattaaagtaataatcatgtcttcagaaattaacaaataattagcgacaaaaccaagctaggaagctgaggggtgcagaaaacaaagcaacataagcaattcctccgaaagttaaatgaacataaaaggaaaagaagaagacgatgacgatgacgaccaggacagagtttgaaggacacagcgcacaaatgtaccaaagcagaggaagcctggagacacacaactgacagcccacaggacgactgtgagacacacaactgacagcccacaggatgactgcaaactgttgttcttgttgttgttgtttggtttcgttgtttagttgaaaacaagagtaaacccaaactaaaccttagaatttctagaaaggcatggaaacataagagacgagaaggaggaaagggagaaggaagagaagggccagagactgtgggctccacacagacgtaggagtcagtggggaagctggttgttagacacggggctcagtgcagaagcaggtgggggcggtgctggaagaataaacggcaacgataacgttctagaaacacactctttgaaagcagaaagacgctggccaccagacagcctgattttagaacagactttacacaaaacattctgaaaaggaaaaaaagaaaacaaaagaaatggagaataattgtaagatctgctctgaccaacttaactctcaacaagcctggataaaatgtgtgagttttgaagaacaatgtgatttgcccaaatcaaatcaaacaagacagaaaatggcctaacaggattatttctacagaagaaataactgtctaggaatgacttcagaatcccaagctcagagtgtttcacagggaagttccaccaaatgtacaaggagctctcttcagtgctatggtactgctgcaggttagaagaaaataagaaaactacccacgttcgtcttatgaaataagtaaaagtgattaaaaatcctgattgagagcaaaaatatctagacatttacaaacatcaccccacgctcagatgtactcgtgttgccactgaattccacaacccagtgtagtttgtcccaggagccacaaagacactcgataccagaagtgtcaggaaacattaaccaaactcgagttcagggcaacacattgctcgagataactataaaaagaaaagcttcatggccacagggatgctctggagccgtctggcaagacttaatctcattctgattacaacgtatacacaaaatatgcataaacagacagacaggccgacgagaactagagaggcagataggagattcattaacaaaataaaacacgctttgccagtattacatttggtgggaaatactagacactttcaatgaagctgagatgacaaaaaagatgtctgctatcatcttaaatatcttacgtgtgctatgtgtacagtccaaaacaattagccggaagacttgacttgaagatattttttaatctgtgagtatttttagataaacccctttatcctataagtaccaaagacaataaaaacagtaggaaaactcaaagtgctgagatttaaaacacgaagagatcaggggagatgggaagacacgctggtggggaagcagtgtaaagcccttctgtgttcagcgggatgtggtatagcatcgaagggtctgcattagtgttggcttgagtctgcacacacttgaaagggtgcctaagacgctaacaacactgattgggtggacagaggggtgaggaaggtatatagtttgtcatgtgttaacaaatcaaattgtatatttaagccaatctttaattgcgagagttctcttaagggtctcagagaaacatcctggtagtgaccaagcaactgcttttgcaccacacatgagctcgggagagcaggacttggctctgatgtggcttcctgcttttgtacgtgtcctatgtcaccccagacacaagttcttctaggtcaagggtgtttcttgaccagagtgacttgcctttccctcagaaaactctgtccctggcacttgcctctgggctctgaggtaggcggccacagggctttcctccaaggctttgttttgagacagggtcttctgtatccaggctggcctcagactcattatgtggccaatgaggaccttgaacttctgatcctctggcctccgcctcatgagtgctgagatgacaggtgtgcatcacccacctggctcatgcggtggagaacatcgaaccaggctttctgcatgccggacaggcatgtgctccatgactgagtcacaggcaggctctgtaactgctatttccagtccagccctctgctctattctgggtacaggcggctgctttctgaaactgctgcgggcacttcagagtcctctcttagcattctgttgtttcggttcctagttaccgtgaccgagtcttgctattagtgttcctctgacatgcactgcttccgttccatgttgaatgttcacgtcgttatttcttgttaaggtgtcgtttcttttctatatcctaattcaagcccaactgacacatcaaagaactctttttcgttctaagcacagactgtttgtgagtttgactggttagcaatctgcagggtctagatcttctatgagctgctgtaactttgaaaattgtggaagcacctaagaaccggagagaatcggttcacagaggaacagcacacatccctctctggggtagctgagcacagtctttttgggtgggatactctgttaacccagcaatagggtcttggaaaatgccagaaagatgtggattttgtccccagcggcttcctttctatggacagaagcagacaaatgaactccacccaagcaagatccctaacgatggttcctttgcctcgttaccatggtcattcagggcacaatttgggcatctccaacatttatgcaaagtccacaatatttggttcatttgcaaagaaaagttgactctcccagtatcaacaacccacaaagccctctaccatggtttgcgtacaagttgtaagaagatttccaggtggacccaggacccacctccatcaaactagacacccaaggcccagggagaactggacttagaagagcacgggaggggttctgcggaatgccgccttctgggtgagacggttatgagtcaccacagcacatgatcagggcacacttcacagtcctatcataggagagagagacaggctactgaggcctcgcctcagctcaggagttactgacagctactttgatggctgctggaggaagggagcggtcgctggtaggttgtccatagatgagctcacactcatggccatatgagcagcactaaccaagcagtccacgaagtcctctaccactgtctgtgtacaagtcataagatttccataagtggggtaataaaataacagcaaccataataatattcaagggttgctttattatgtggtacacatactaaaatttaaatttaaaaaatataaaccttattctgggttgttgtgcagcagacaggtgcaccattgtgaccacgttcttagaaaaacatttacattcattccttgtcctcagagtcctctacgacgcttacaaggccacagccatggtgctgaggggtcctgaatcacagacttaattttgccttttccaacactccccccctttgaaataaatatggaaacataaaacaagatgatcattgcaaacaaaatgtgggggggggtgaatacaagaaagaggttggggagcccagaccccagcccagggatagatctattctatcatttaaataaaaccaggaaaagaaataaacaagaagccagaatcaatggcaggaggcagagcagccagctcctttattactgtgtaaagatgtaagagcaaaacttcactggctggtgataacgagctgcccttccgtcagcaactcattagaccaactctgaatctgctcattaaccaagttacactgagtctcgatttcagagctggaggctagctagcctttttatagcacaagccatttcctactgtgtcctttcagctgttaaagagtagcaccacagctttagccgaagagtactgggtgactgtcctaacaaggtatagtttctactatgctttcgccaagaaacaacaaggaatgaactatgtgcatagtttggctataagcatacagggtgaatggaaaagcacatgtgcacatacatgtacactcagtgtgtgtgtgtgtgtgtgtgtgcacgtgcacgcgtgcgagcatcccatcactgagtgccaaaggccttcgtgtaaaacagcatggtctttgcatataacctacacacacacacacacacacacacactcccataaccttggaattgtctctgggttaactcttagtggcttataccacaaaatcacattagacaaaattcttttttaatatctattttatttatatgtatatgtgtgtgcctgagtatgtggacatacactgtgtgcatgtaggaacacgcaagaagtcagagaaagtaacagatcccctggagccagagttacaggaagttgtggcctccaggaggcgctggaaactgagcaagggtcctctgcaggagaggatgtgctcttcaccactgagccctgccccagacatggcggggtcaaccatttccatccacatcacaagctcagcataaaggtctgtgctctgatgccgatacacagggagctgacatgcctgtcacatcagagccacccagggagttatttaaagagcacccctggggctagcaaggcaggggctcagaagacaaaaannnnnnnnnnnnnntccctacaaacctgagggcggggctccggctcccagaatccaagggaatgatgggaagtgtgctctaattgcaacctcagaaaggcagacgggagccgggagccgcacagcaagctgggagagcagccccatggggagggctctggtctccctgccacaccctgcttcaggaagaaggtagaagggtacctgaggatgccttctgatattcatcttgggcccacacatatccacacacatacaaacatgcatacacacacacacacacacacacacacacacacacacagaaattaaaaaaataaaagcagaccttctgggacctacatcctaaatgaaagtagtcagcatggccctggaaagtaaccatgggtgtggaccgttcacacagccgggtgaaacacttagggtccatttgcagcccacaccctgtcacctcttggcagggtggccctgtccagcttcctttcattcaatggactaatcatgcctcctacaaacatgcattccaacgacagggagagtaagctacacacgtgtgtgtcaaatgttccacatgggtgaggtcgtctaccaaagagctaatggtgataatctgggcctgactgttagacaaaatctacatatgaagaggtcagaagagaaagtggcattcaacaaaccagcaccatcccaagaaggttttaaagaataagacaaaaataaaagaccttcgtaagagggggaaaaaataggacaacattggttttgctatagtttaagagaatccacccaaaatcacagacctgcgccactaatccctgctgactcagcagactggaggactccaggcacctgggttcagggcctttgatttctgctcacagacattagcatggaagccagaggtggtcaggaaagccaagctggagtttggctatcttctgggttctccttaaggccagggtcagatgaaagagccctcaccctctttcccaggcttcagtctcccaacactgaccgctgctgtcttccggcatcacccagatctccttctgggagatgcagtctagagactcagctgcatacaaaggttcatttctgacaggtcccgattccataacctcagtaaggagataaaatctgaaaggctgtttgaggggctgggaagatgggtctgtagttgacaaaggctttagggtaggcgttttcaaccttcctcgtggcgaggaccctttaatacagttcctcgtgctgtggtgacccccaccataaaattatttcattgctaattaactgtaattttgctactgttacaaatcataatgtaaaaaatatctgtgtttcccaatggtcttaagtgacccccgtgaaaggatcatttgacccccaaaggggtcacaacccacaggctaagaaccgctgctcttaaggggtctcacacccaattccggcctttgtgggcacctgcatacacagacacacacacacaaataaagttaaaaaccttaaaaattaaaattccacttgagctcacaatttaaaattctttctcagtactgttccctaaactgtaaactccctttctctcctccacagatcatggcattgggggaaatgatggcagctgtctacataaattcccagaaacaatgcccaaatactatgtattttgtaataattgctgagtcgttgtaaaaatcatttttaagtgatgtggggataagttctctagtgaccagaactgagttgcttccttccactacattatttatccacattacataatgcttaatttttgatcttcagaagcgtagcgagatatagacacacagacacacagacacacagacacacagacacacagacagacaaaggacagccagacagcaactgttcttactggaattagattatgtgtagtatctgctttctagtacagagagctgcaaaagcttatctcaggcagactcacgggtcacccacagcattgcacacacgtgacatgtctccagtgaagcccagctccagacactgcaggccttacataacccatgctgctgttggcagagccgccgcctcagtggctcagctgtccgtgtctcctccagccacaccctgcagctctaatctgcagtgtcctcatgtgcagtcacgtgtttggggacttttcgtggcagcaaacaaggcaggcactattccctgcctaccgctaggcagaattcagtaacaccaatcacaaggaacacagatcacatcaggacggaggtcacaagtcttggagaaagcaggtgtcaagtgtacactacacaacactccccccgccctttcaaacaaacctttaaattgggactacatagggtaatttaagatgctacaacaggtatagccagctgtcaatcataaatgcttctcccaacatgagtcccagggaacaataatcccaaatatcagatatgcatgcttttgctcccagggctcagagagaacacgcgctatcatgagatgctaagtatatctagtctccaagtaatgttattaggcttgttaacactgagcaaacacacatgtatgtgatgggtgtgtctaaacatctaccccaactccctgacccccaccacctgccccccacctccaccccttttcttctctggcattttattactaattcgggtccctagtataaaaacactgaatgccaaatgaactctagtctttcatttactcaaatatttaaaaatctatctacacacagtgaccctgccctaggtatgaggcaaatatatgcctgttattttcaaaaacagaatctgtgttggtgtgaatgtgacataaggacggaaaactcgtctgaacacaaagagaacccacaaaacacacagaaaaaaagtcaaaaatacacacttttttatcactccaagatgtacctatgtctctaccaaatagcaaaataacaccaaaggtggtaacttagtattacagtagctaaaattaagcagtggtgaactgtatgaaattaacaccaatgactagaattctgaataaaatttgactatattggtgtaactagatttaggtaaaacagcttttgatctcctctggtttgaatatttatgttcatacggtgagaattcaaaatataaatgagaggaaataaaaacatttacataatttaaaggcttctagtcagctaccctgagatatcatttatggaacaatgacaccttttggcaggctatggtattgcagcccagctctatagtctgttcattaacagaagggagggagagggggggttgggaggagaggagggagagaaaaccgcagtcaagatgttaaataaataaataaatgtttaaaaaatgaaaacaacccaaaatacgttatatgcatgcaagagaatgccaaaaacaaagccattattttgtacaaataatttgtgcttaaaaaatgattccagggctgacaagacagtcatggtagcctggtaactgagtttgatctccaggttccaacttcacggagttgtcctctgccacagtggttctcaatctgggggtggagtgaccctttcacaagggttgcacactggataccctgcatatcagatattcatgattcatagcagtggtaaaattagttatgaaatagcagtgaaataactttatggttggggtcaccacaacaagagggactatatcaaagggtcacagcatcaggaaggttgagaagcactgctctaataataagtaatttttaaaagatttcagtgtaaatattgctaccagtaggtgagccaaggagacagggaccagcaagggagcaacggtttcatgtccccatgacctctgtgacttctgtgacctctgcatcaccaagactttccaaagcccagatctctgtttcattctacatcttctgtttaatactttttagctcgggtttggggacaggcatacaaagtcatccttgatcagaaaccagattcacacacacctcagaagcgccagcctgcacagctacagtcctcgtctactgacctctccaacttgggtgtctctcaccaatgtcattgtagcaggacaagcctggaagagccagtcctcatcaaaaacctcaatccagtaagttcaagttcactaactggctgggcaatggtggtgcacgccttaatcccagcattcaggaggcagagacaggcggatctctgtgagttcgaggccagcctggtctactcagcaagtgctaggacaacctccaaaacaatacagagaaaccctgtctggaaaaaaaaaaagttcactaactgcaagatgaatttcactctcactgctctgactatcagaccttccagaaggtagttggaacactccatacttataccccaggactagaaaaacagcctcacagcccacatggggactccacacaaggtaccgtgtcctgaacaatgtgcagaaattcccttgtgtactccacactaggcaatgttcctgatcttctgaggtgtttttctctcgatgatcttggcccttctaaacttcttaaaagggcctggagagatggctcagtggttaagagcactggctgctctagcagaggaccttggccatcaatccccagcacccacatggcagcccaggaccctctgcaactccaggtgccaggatgtgatgccctctttaggcctctacaggtactgcatgcatgtggagcacatacacacatacagacaaaacatctctatacctaaggcagtaaacataaatcttttaagtgtcccttctctatcaattcccaggccattcatgagacacaattttcacccaccttttagaccagtataaccccagtcccaggacccaacctccaactgaggtcaacacagtcaacaatcctgctgggatctgacattcggggaccagacaggagtcgtgtgttgcccactgcagtggtaaacagtttctgggcccttgctctcagcctgatgcagcctgccacattccctttctcgtcacggaagctgtgccctttattgaattgggttagcccaagatgctccatatacacagcaaacaaagtaacacacggagctctgagtctcatgaaagtcacagtgctattgagaagacagaccatggtaacaggagtgagaccaacagtgggcactcgctgaaactccctaagacatcaacaaatgaagagctatgtcggacggcctcatcacgaaaggcactggctgtgactctgagctgagacctaaaaaaatattaatcaggcacacaggggaggagaaattgaatccctttcaattcaggtatgctcctggacttgctgggacaaactactccaaatactcatcttagaggacatacagtcagtctgccgtggaacgcctctgctaccggtcctctgtcttgagtgaaagaagcagactcaggatgggggaactggacaccatgtgaagtttagcagtagatacgtctatgaagaaaccagctagaactcgattgtgtcctacaaaaccaggcacccacggcatttctctgaggatggtggcctcagcatggacaaactgtgaggacactgaaccctgaggagtagccttacccctcacctcatgggcaaatgcaggtgcagggctgtcctgtgttagtgccgttgcaatctctcagtccttctgagagaacagaacaacccttctctggtgggaggagcttgtgtggtggaccacagaggcaggaggattctgggcttttctctggccagatgctgtccttttgagtctgggagaaatgcttgtgaacacacagatctacctcttggctcctccacatggatgtgacggcaatgtcctgtcatccgccagaatatcacctactccccctgtgactcaagtcccagaagaagggaactgaaatgggctcgccaaaccccagcactaacaaacacatgtaagcagaaccagaggtgccaacattctgtttgggggccacagaactacatttgagacctgccccagctgtctgcatcaaggacagacagcaaatcggaaacctaggtgcagaagaaaccgcaggggtgatgtgatgtaatgagaaccgtagagacccatgtctccactcctgacactgtcctcagccacgcccatatatggagtgacactgaggactaaatctggggcctggtgcatggcaggtattcactctgccacaaagcaaaaccttcattttctaaatttactctgaatgtcattattggtctgtgtagaccaacacaaagagaaaagctcctttatcatagctgtatgtagacggtgagcaactgttttctcattcacacaagaaccaactaacttctcaccgactcgctagaaaccagtgcatcagaattcctcggagagacccaggggccacagaatacttaagactgtatgagtgacgctcttgggccatgttcccatttggaagcactattgccagcgttgtctacagtaaaagtctgccgtggtggggtccatgctagattgtcttccccaccaatcctgcaaaatgccatcccttgaccttccctttgtagagggcaaaaggtccttgtgctcatagatgagcaccagggaaaccgggagggttaaacagacagggttgtgtcctcaacagaggagatgcaagcctgtttccacccagacagctgggagtgtgtgccgttaatggcctgatggcctgtgctatctgtaggcagggccacatccaaagcccagagactatgtttatcccagactctccctacccaggctttatcttgagcactgtttctcagtcagtagagcccatgcttaggggagatgccccgtgcactttataacagcgtaggaacctctgtgttatcagtagggccaggccacacccaactccctaagactttatgctttcctccatcattctccctagacccttcagaattgtttctcagtcaacagaaccatctttaggaaagaagctgtatgtactttgcaaagactttcaatgtaaacatgtcttaagtttgctgtacatataggattgagttaaacaacatcaggaaacatattaccaaatgtttgctgtccttaaatacggctgagataaactgcctgggtgtcagactctaaagcttgaaccaacaccactgacctagtcatggtgatccagttttccttttttgcctcacatggatcattgctctgccagccctggtgtctgtggagaccacacatccctagggctacaaatgtccttgacccaccctatggtctagaagccacctggattcaccacgcccatcagccacacactcgagggttcctgttctctacttctctacttcgaattctaggagctgtgtttgccatggggcttctctgaagtcagcctcaaacttaaagtctccacaaaggagagttaagatgacacggatctgcttaaaagtctgtcttgacatagctcctctgggcagcatgttctatatattaatagctgggactactgcaataagctggcagtgaggataatttctgtcctgaactattttattgtcctagtcggagttctgttgatgcagtcagagaagagctgaggacggacaaaatccagagctaagtctggagtcaagcactttcaatattcaagtcagagccacatttaatactgaatggtcagcattctcagggttgggttgctggtgaatgcaaagtgcattcggctaattaaatcagttacagtcaattatttctctcctgaatgccccaaggagtgagataaaagacagctacttaataaccagacaagcctgcttctgcatctgggtatttcagactattgccaacacccacaggattctcctaatgtgtctcgccatagcctgtccaccaaaataactgggcaatgtaaagaacaaaccagtgttgcatgctgcagaaaaacaaaaacaaaaacaaaaacaaaacaaataaaaaaaccaccaggcactattggaagatagcgctattattctgcaaatgccttcaagttttgttttattcattcactcatttatccattcattcattcattcattcactcattcattcattcatcatgtggaggctctcgggttaaacttaggtcctgaaacaaattggtcaagctctccacctctgagctccatccctagaccttttactctttatttcgacacagggtctcactaacttgcccaggctgaccttgaactcaggcagattctgaaattataatcctcctgcctcagccttctagctatctggtattgcaagactgagatatcaggttaggttccagctttactgttctgattctgactgcctactctctactggcaagagtaaactcaataaaatataattgatgtagaaaatttttagacccaagaaaataaaatgttgctatgagaaacaataagcataaaccaagatgctcatgaaatactgacatgagtcacttttttctttagaatagttgagaatttattcttccgtttttctctcgtatatggacatagggaatggcccattgaaacgccgctggagcagtcactacaactgctgttgtcttctttgtttcctagcgcctgctttatatgagtcttagaagtgaccaccagctgtttaaagatttgcattttccaaaacaagcaggagaatcatctgtgatttatgaaaacttataggaagtagggagcctgcttcccaacaggacatggttttcaattaagggcatttctgtttgtttgtttgcttgttttgcaccagtgagtatggaatccaggcatcatattccctaggtgaaactctacaaagaagctagcatcaaggccctggataaagcatttttacatacatattttactatggaaacgaccaggctgtcaaaaggatagccaagcagaactgcttcatttaatttgtagcaaagaggagatatcaaagatactacccaattacccactctcaattcttcatgatcaggaacatcgaacataaaaagtagtcaataaaaatcggggagactgcagaatcatcgctggctaaaaactaccatgggaacattttctgtcaattttcaaattcccatattggtttttttttttttctatactacttagctctttcagtacatggcccaactttctgcgcgcacacacacacacacacacacacacacacagagagagagagagnnnnnnnnnnnnnnnnnnnnnnagagagaggagagggagggagggagggagggagggagggaaagtgtgtgtctcagtgtcacgggacccccctgtcaatcagctcttttgggaaagcagaaaccatgtcaggtttcctctgttagtttgaacatgcttaaataactgtttagaaacaccttcctaactagctctgcagtgtgtgccaccaattggctgtctactgcgctgtcctcagcataagaagcggacagcaaacatttatttgcacacagcccatgatgatgagcagatcagagaaagaaatggcattgggatgagcagattccatccacaatacaggttgaagtcctggtgccccaaccccacttggtagctctgaatgaacaaatcatccttaaatggataattaaattaaaactaggtcattggctggtatcatcctgaatgactaatgtcatactgaggaaatttagataaacctatacggcaagacaggatggttgaagacacaaggggacatgagggccacctacaagcccaccagagaaacccggggcagatcccttccccatgaccctcagaagaaaacacctcatcatcaccttcacctagatttctggagccataagaaaataaattcctactgtgtggggacatactgtttatgattgcctgaggattcagaaagcaaagtcagcctcaagctatagagatcaggcagtggtggcatacacctttaatcccagaactcaggagacaaagacagatcgatctctctgagttcaaggacaccttgggcttcatgagattgaatcagtctaaaagagcaatagagctcatgcctttagtcccagagctagagagatataaaagataggaacagggtcttcagtagtcagtctcatgaatttctatagccacgttgaggagagcatagcagtcttagtgaatctggggagcagtttgacgattgcccctttggtctgaactgaggcagagttaagagctagtggctgctgctttgcttttctgatcttcagcttgaggcttgacccccaatatctgtctctgggtcattcatttttcatgctccaccattaaccaggccactctttctgcagaactctgtatgacaaatgctgtgaattctaacagtttcattccctcatgtaacaggcgccaaacacctgacacctgtccacatgaccctccttgtggtagctagtgatgagccagaggacgccagtcaacccaaccatcctcctagccatgtgggctggctagctgccatgcagtgcaccctccggaatagaatattcatctccggggcatctgagcccattgtggtgtggtttacgctgtgtgtgatatccacctttctccctgagataacactctgcagacacatggggattctccttccagaaaacacccctggtgcacaccagcaaagtgatgtgtaaacaaggcatcgtgcttgactcccagaaaatggaaggcaaggaagagtaaaggaactttctactgggcctcagagcaaagggagccccaaccccaacttggttaaaagacagcagggcacagtggcccttctctacacagaaggctcatgcgaatccacatggagctgaagaaatacattttcatcatggaccgtgggacactgtattttctagaagaatgaacaacggaagaaatgaaagaaagtccaaatctctcatgaagatctcctctcaagatcttaaatgtcaggctgaggggacggctcagtgggtgaaggggttttcggtgcatgggtttggatcctcggaacctgtgtaaagctgggtgtggcggtacaagtctgtaattgcaagggctcccacactggaatggggtggacacaggacaggtggacacaggacaggtggacacaggacagtccccagaagcacagggccagagtctctagcatatgtggtgtagcagccaccttgttttttgtttgtttctttgtttttgtttttcctgttgctgtgacaaacactccaacaagcagggcgttggtggcgctcacctttaatcccagcacttgggaggcagaagaaggtggatctctgtgagtttgaggccagcctggtctccagagcgagtgccaggacagcctccaaagctacacagagaaaccctgtctcgaaaaacaaaaacaaaccaaaacaacaaacaacaacaaaaaaaaccaaaaaaaaaaaaaaaaaaaaaaaaaaaaaacccaaaaaaaaaaaaaaaaaagcaacttaggggagggatttatttcagctctcacctccaggtcacagtgcaccagggaaggaagtctaggacaagaactgaaacagaaactatggtttgttccctcctgctcagctccctttcttaggcagttcaggactctcagcctagggagagtcctgcccatggtgggctggtcctcctaaatcaaatagcaagaaaaaaaaaatgcccacaggccggtctgaaagaagaaactccccagctgagactccctcagataactctaggctgtgtcaagccagcagtagacgctaagcaggaacacgtcaaaccacagagacccccacctctaacaaggtggaaggaccaacagcagaagctgtcctctgatctccacacacaagctgtgacacacatgcatgtggcaggggcgggtcttaaacatgcctttgaaaaagaaaccaactagagtccagggcggggcaggaggctgcctaaggagaatgtcaaatacagtgacagggccacatagctcccccaaatttcaccacctggtctttcctgttgtcagtgtcgcatgacccaccgactccctgacagccttcaaatcaagtgcccgtgtggaacaccgttcagtcttgaaattaaaatgattccattactccagcatcacacgtgatcatttaaagtgctctgagcaccggcctctagaggaaacagttaaatgaaccaggggtgccacacataatcaaaatgaaccaagattcagtagcgcgcgcacgtgtgtgtgtgtgtgtgtgtgtgtgtgtgtgtgtgtgttccccgtgtaagctgtttgctaataaactccactccaattatactgggtctggtggatcctaacttccacacctccccatgtatgtgagttaaaatcttcctgggggctgtgaagggagtggggagccacacacgcccactagagctgccgaccactgtaaaacagcaactcgggcagagggcctgttaattgcatcacaggcttgctgagtgagcctgtgattattggaatttacgtatcaatcaaatgtgcatatatatgagttacctttcttgttgctgtgaccaaacaagcagtaacctgagggaaaagggacccgatggcacggtggcaggatcggtcacgtggtgtctgcagccacagacaagaggcggggccagactataaaatctcaaggcccctctgcactgagctacttccgtcactgaggcaccacctcaagcttccaccatcttgctcatcggtgccccctgctggagaacactgctctcaaacacacagtcttgtggggaaggtccattgtcaaatcacaacacattagaacatcagaactactcaaagtccaaaaccatgatccaactttacaattcacagttccagactaagatggattcgcttttccttttagaggaagacagaacaattacctccatcaagtacacaatgcctttctggggtgctttgcaaagactgaagctaattacccacttccacaaacaaacacgaaagcattattctatagccaacgcatttggttaaaaagaaggaaaatctcaacgtaaaggaaaaagtcacatttttttctttagacatttcgtaacccccattttagaaataggaattttttattttaaaaaatcccttttcactgtaatttggcacaattgtgtaaagatggcacatgaaaataagaaaagaatccgaaagaacaactcgtatgtcagtcgagatctcggagattaatatttatgaaaacaattggcaaacaacagcttatgatccaagacgagagtgcccagcagatgtctcgttaggaggcacagactctgagaagaagcaatactgccgcccatatgttctcagccttaggatccctcagccacttcactcccaagatcacacggtgcccacgtgtgcaaagaggcagacgctatcttgaaagagaactttggaaagtctgtttattcagagagagaggtggtatgaggggctgtgtggggagggagcagaaaacccagccagctaacttagtctggagacaccatctgctcaagtcgctctcgggaggaagcgggtgttcttttgttcttggagcccatctcacatctcttcccttgtgttttgtcaacaactctccaactccttaggagttgcctcccttctgtggtagcatcttgcctgagaacctgtaacagtggctacaccctttgggtgtggtttcaggtgtggatgtgacccatttaagatagaggagctggggatggaagccccttttgggtcttggagagcataggagagacagggtatgcatcctttgagcaggaaagccgcgacagttactgttcatccccaataaaagacctatttatcatttatatggggtctggtgaactcattatgactccccaccttcacccttcaccctgatttccttcggaatgatgatggggagtctcctgcctcagatgctcggcagtggggcttgtggctattaactctaaggctgacatacaccaggatgagtgagccaaggaggtgggaagttagcgggatctgaggtcctgattaggtctgaggatggccagcataggcacagcagagacctgggtgctgggactcctggatgagtggctgcacaaatgcaatagctcctgtaggtgcgagaaatgacaggtaggtgatggagaagaaaggtccctgatgatgccgaggtcaggagctgagaggccagagtattagctgtgggaacttcctgttgaactagatatgcatgaggaccgtctgggatgaatggagggatgtgacaggtgtcaagatgatttagtccaaggtcttcactcaaaaatcaagttgttaagaatttcaaaaatgggagaggaatcagccctggggcagcagtggaaacctgcacacatgcaggtttcctccaggtggaggatgggggagaaaattcccattcaataaaagggctggccttggaagaggcaactcttagggaatgggcacaggttgcagaggaagagaagagaaacttgggagaggggtgcagagaactggggaaatatggctgcccaggggtcttgggggttgctctgttcactgacagggaaaagcaccatggaaccactgtcagaactgtcattcaaaaaacaggacaatgagcctaagaggtgggagtcttgtctggatctgcctacaagacaaccaactctccacaggtcacagcctgtttctctggcatcaatgactatatgcacgctggtaatagatggcgtgatcctgatggtgaattgttaaaagcaatcccacagtggcaaagtaggaggttactgctttctatgggactaacagatccggaagactacatacaaccttgcatggcaagaggacaggaagtagactcggaactttggatagagatcactaaagaaaaacaactctgtgttgataccctcagccccattggagtgccctctccaatccaaaatatcccctggtcctcattagatacgtcatgttctgggctcctcataccaagccaccgtgttgtgttcctatcacacttcttttgtctttcccaggctatgttgtgtaagcagtagagtctgtagtttgaagtgtagttaacaacacaaacaaaacctaagaatgactgtgaaaagatgagcctcacaactccactgagaaatctgcaaacgttcaaactcttggtgccttttgcttgaaggaagaagtatccagaaaggcttaagagtctcaggcaccaggtggaacaagcaggagacaaactgatgccaataccaattctgatgctgaaggaaacagtacatggcagatgttcaaaaaccattagacacaaatgaaatgtggtctgtgttctacactgttaaatcactcttgctctgtagccacatgcagcatcccacagctctgtggcctgacatctcaacaaaatgagaggtacccacattgggacatggactctaatgttgcagaattgttcataaagccattcttctgtgacaacaaagccaccttaaatcacaggacagagtcagcgattggctgacagggattagccatagagttcttagatgaatgaggaggtctgctagagaggacaggaagagagaagagggattttccagggggaatttctggggctgatggtttgggaaaaccatggagagaggtcaaatttaccaggtctttatctcaatttgtgactcctgggtttttattagactggaacaatttatatattcattatgcctggcatccaacacctggcattattaagccatgccaaggcggtgagcccaccatgttgccaccaccaccaccatagcagcctgcttagttccctccccacaatccctctgcacctttttctcccatctgggggatttttgcattgcagtctttctacatcagttgtcagctgctgtccacaccaggccccaaaacaccacctaaatgagcctcccaccaccgccccatgccttcacttcccaccatgtggttctcccccaatcccctccctgggccatcaacccaggccagtttggctgcctggagacccactcagggcttgggcttttactgctgctgccatggccacatgcagctgaggaacccggctgaggtcactgccagtgacctctaccacagctagctgttgtctacaccctcagccccacatttgcacaagcaggtgtcttcagcccagcacagcaacagccagctgagtatactgctggtcagccaccctacccgacactcccagcaggcagcttggttttctcccaccttgcatcttgccttttctctgtagcagcaagctgggcagtcctatcccatgctgtatccccgctgtgcagatttctcctactgatttcctatttccttgcttgagctcctcagacagctcaccccactccccacacaacactaagcagccacagtggtccccagtgcacctgccctccttcagacacagtcgagcatggtcactgcagttaattatccccatacatccccacctatgatgtcagcatcgtcagagctgatacgacacttgggaatttttaaatgggggattgggtttttaaaaagagacaagatggaatcttccccatgtgaagaatctgaaacgtcacaatgcagggagttaggaccctatttagggctactatggatggctggcaaatgaaaaattaaatgaggggaaaacaacttaggtgggattgacataatgtcattcatagttattgtcagtttggtaattcatattttgtcctcaaaaagtggtttgaagactgtgcaaatatgacaatttgacttactattcattgataagaatcaagctttagaaagacttattactgataagacatgtctcagacttactaatgaaaagaagaaaaatactcagacacagaggaatttagagcagaacctaccacaccattacattatgaaactgaagaggaatggcccaaggttatcagaaaatcaaccttaatttatccagttagcataggagaatgaccaccagatggtagctgccatcaaggccatgcagaagttacctgggatcctggagaaatgttatatttaaggaatgaagagatttaaggaatgcattaagattcatggtatgcattcaccctttgcaaagcagatgttaaattcatgggccactaggaacagtatcattccacaagactggagacatttagctacagcaatattggaagctggtcctcagttacaatgggaaacatggtagagaaaggaagccagggccacagaacaggggaatacagctagagggtttgcaatttcccaagagcagcttctcgttgagggagaaaacagtctagatttgatgatgacactttggtgttgtgtcacacagcagctttgaatgcttgggacagggttgaaggatcaggaaaggggactgagtcatttactaaaattacacaaggcctaaaagaaaccaccactgggtttttgtttgtttgtttttgttttgttttacaaagattgacctcagctgtaaatggaatgatatcagatccagaagttaggcaaacactaactgaatctttggcttttgagaatgctaattcagaatgcaagattatggtgatccagcctctaaaggtaagatcagcacacagagatgaatggatccaaagacagctgatgtggcatcataagctatgatgctgttttaataggagaagggatttctacaaattttaaggaaaatcaaaatatcagacattttaattatgatagacaaggtaatttgaaaaggaattataggaagatgctcctagaaacaatggggttttttaaagagataatccagacaccaggcccagccttgtgcaataagcagaaggtatggtaaagagcagcactggactaatggatgccgatcaacatgggacaggaaatgcatcaattctccatcagaaaatgccctgagtggcctccagcaggcaacatatcagataggggtcaatcattccctgtcaccattggagaaacacactcgcagagcaattaaaagactcaattcctgttatttaaaaccacactgtcaacgggaggaagaagggaactgggattggcatgtaaaacaatcttgtttctaattcaaataaaaaaatcttaaaaaacaaaaaacaaacaaacaaaaaaaaacactgccctggatatgtccaaagacaaaagaacctccacagatacaacaaaacgttcaggagagaccagaaacaagtattttggcaaactgctataaatgatcagagaccaaagctaaaaatacatgtaaagaacatcgaaattgggggttttgtagacacaggtgaagaagtaacaatgatttcaaaaaaaccttggcattgaaagattttagtttgctgagagaaaaagttttgaaagattttagttcacagagagaaaaaggttcccacaggccatggcccaggacaaggaagttggccccaaccccgggcacatcctatggtttagacgagggcaatcgccaagacaatcctctctgggtcacacctggctggccaaaagacaatcaaggacttttcagggtacgtattgtggtttttcctttgtagaaaagcaggtcacacctgggtgaccactctaacacgagatcatactttgtaatcaatcactttgtgccccttgcctgtatgctgatctgcggttctttcctatataaggagcttgcaccccatgctggggtgtgcagctttcccgatattgctgacacctgaatgcacattcgttcaataaaccctcttgcttttgcagctcttggtctggtttctgagtctcgggggctcctcgggaccctgtgccccttaggggcctgggggtctttcagcattcagattggcctttccaggaggtacatgttcaacctctagaattggaactgtatctctgttggtgtccagaaagatacacagtagatgacagctggtattcataaggtcgatcgccgagaaaaacaatttatctggtggaggataaactcataaacaaggtttatggatccattgtctatgaataacaggattgattctgcctgtaattctcttgggtcccactctgatcccccctaaaatagccatgggatttgtcccacaaccttggaagtatgttcctcatttttggggcaccattatttctctgcactgacagaaggatgacttctccccacactgtgtaattctggtaattaaaacaagcctttgtctcacaaaacagtgagaaacatagaaacctgttctgggcaattagctaggcagatagggagattagccagattgagagtctctgtgtacagattatgagttagacttttcacagataatgctcagggatcagggatgcaaatgtctgctttgttaaatcaaggtctttgagacacagagagacctggatcactttccagtttccatcctgcctggctgataacagagaccagaagctactccctactaagttccatagcaattaacactctgcacaaacttcttttttttttctttttttttttggagggggggttcaagacagggtttctctgtgtagctttggaacctatcctggcactcactctgtagaccaggctggcctcaaactcacagagatccaactgcctctgcctcccgagtgctgggattaaaggcgtacgccaccaacacccagcttttgttctgggtgtatcacaaacttctaaacttagtttgtgatacaaaattttaggctcagctaactaactgttcatgctttacagtcctaagatttgtatggaggacaaaaataaaaaccaattaatcaagtccagagaggaacaactttacatggagaaaagtttcacagatagccagggctgcagaagatggtctggtcccacagccttgattaaaaatttacaagcttccctccttgtgcttcgggactatatgcaggaagagaacatgtatctttaggcttgggatgcttttcagttccagccctgatagatagataggaaattccccccaaatccttacttccttgaaggcattcctattgctaccctgcaggcagccctgggagctgggcttcctggactgctgcgtatctcaggaaaaaaaaaagtgctagatacattgaatgcatagggccaggacagacaggaaaatccaaaccatatatggccaacatagcaatgaatttatggggctgtgatttgttgcggcaatggaaaacacagattaacactccccccccccatctcagaaacaaaccacaaaataaagactgcttctgagagaaatattaaaaggtattaagggtggtcagagactgttgaggttgtacatgagcaaggcagaacagatggtgatctttcaaaggtaccaacagccctacctttaaaatggttacctgacaaacctgtctgggtggaacagtcaggtttgacatcataaaattacagagattagaacagctggtatagaatcagttaaatgctcaacatattgagaaatattgagaattacagagaaatttggagaatggggaatgttaacagatttaagagccataaataaggccaggtagtggtggcacacacctttaatcccagcatttgggaggcagaggcaggcgaatctatgtgagtttgagaccagcctggtctacaagagctagttccaggataggctccaaagccacagagaaaccctgactcgaaaggaggtggaggaggaggaggaggaaagaaggaaagaaagaaagaaagaaagaaagaaagaaagaaagaaagaaaggaaaagccataaataaggtaatttagccaatgggctttttacagcccaggattcctttaccttctctattacctaaagattggtctacttttgtgattgactttttccttaccatacctttacaagaacaggctagagaaaaatttgtcttcacagtgcctacttacagtaatccccagcctgttaaaaggtatcagtggaaagttcttccacaaaggatgttaaacagcaccaccttgtgtccatattttgtacaacagtcactggaaataatttgtaaactgtttcctcaatctataatttaccatcatgtggatgatatctacctagttgattcagacatggataccttagggggaaaatgtttgaagaagcaaggaaaattctgccttgatggaggatacaaattgctccagaaaaaatacaaagagtttctattaattaattaggttgttggataggtttacaaaaaattcaaccccagaaagtacaaatcatcaattacacattcttaatgatttacaaaaattgctgggaaatattaactagctacagcccacaattggattaacaactcaaaacccaagtaatttatttgaatctttacaagatgatagagacttcaatagttcaagaaaattaccagataaggcttagaaagaattggctgtggcagaaaagaaactatgggatgcacatgtggtttgcttgaatccagtttgactgtatccttccacacattttcctacaggaattcttatgcagagagaaggtaatattttagaatgggtattttaccacacaaacagagtaaataaataaataaataaataaataaataaataaataaagatctatgtggaaagggtttctgcactgattctgaaaggaaaattgagatgtatgtcatgaattaacagaaactgaaacaacagaaattgtagtgctttttcctaatgctgacatttcctcattatggatggaaaatgaacactggcaaagagcctgcagtaatttctttggagagattagtaacaaatatccccaaaataaaagaattaattggattcttcctcaattgtgcaaggaacaccaatttctggaaaggcaggttataagtcatgaaatctaagtaaagtgcctcaaggcccttatgatttagttcataaatcagaattacatgctattgttgtggtattattagtttttccagaacctcttaatgtagttgctgactgtcaatttgcataaagagttgttttacatattgaagccactgaaattattccatataattcagaataaactttcctatttattcaattgcaataaataatcaaaaatataaattatgccttgtatataatacatatcagataccatatgggtctaccaggccctcttgcatgaggtaatgatgaaaattatcagctactggtaggaagtgtgctagaatcctcagaatttcatgacaaacaccatgtcaatagtaagagtttgaagaaagaattttctatcacttggcaacaagccaaggaaatgtcctacttgttctttatacaaccaaatcccattacttgcaggaagaaacacaaagggtattcaaagaaattaaatttgacagacagatgtatttcattttgcagagtttaaaaagttaaaagtatgtgcatcacaccatagatacatacacagtattttcagtgggcaactgctttgagttctgaagaggctgatttgataatcacacatttgttagaagttatggccattatgggaatacctgtataaattaagactgacaatgttccagcatatgtctctagtaaaatgaaataattttctgcatattacaacataaaacatattacaggtataccacactttaaaagacatgcttaataaacagaaaggggtaataaagactcccagagttagattgcacaatactctgtgaactttaaatttttttagggtaaaagaaaggaacaatagttgcagagagacactggatagaagaaaactactgaactaaatcagcctgtatactttaaagatgtattgacctcagaatcaaaaccaggatatgtgttacgttggggaacaggttttggctttgtttccataggagaggaagagctgtagataccatcaaaactgataaagactagatgcaaacaggagagccctcttgattatgagaggtaacagttcatcaaacatcatggccattaaacctgtcaaaaggagaaactctaaagttaaagttgtggtagggttttgtttttgtctttgcaggagaataaaggtatccaactaaggaatctagagaccacaggacagataagacatctgaagatgaaggatgaatcaatcatgcagaaaaaaaaatgcctcaagaaaaagagtaaattggcctaatgagatagcacaattacaataggataaaatttcatataaaccttcccaaaggtttgtctctactgctctctactgacatatatgcaaatggtctcttcctagtcccaagccaattaaaaatgaaagctggctttggagttggagcgtggctctctccttctctaaacccaagcatgcttgttaaagtaaaatccaaaatctgtctcatgtcagaagagtcacctgatatgggacaggagaaaaacccaaattagggactattctattgcaactaatctcataattctttagttttgttttgactttttaaaacttttcttaaggtataaatattatctcaaaatttataagattaatatatatttaatatatatacatatttaaactttcttttgtgatattattgatcatatagaatactaactagttctagaaataggcttcatctagcttcctgtataggatttcaggcttgagctagtgaactctgaagtctctaaaaggatgttgggtctccacaatgctgagtccacctggactgtggtaataccactaagctgaaaaacaccacacaaagattagctttgtactataaactgctcagggcagcttcaaatcagttaactaagatgtattgtggagagactggtgttttgtgggtttggaggctaatcactttatctagggccagttttagccttccataacagccattccttatgccactcttgatttgaactaacaccttatgataatcaataaaaacacgggcagaaaaatgagtcttcggctccagcttgaaaagattcaatcaaatgtaaagcactgtttgtttcactgacatcatttaatccctggctccattatgtaacatgttagacaggggcaagagataccgggatttgcattcacacttcccctcccacctcttttcttagtcataaaacaaagttcaggactccgtggcctctgggagctattgcagagtgctgagtgacttcagacagcctgttacctagcccacagctcctctagatatgacattggtaacggctggagaacaaggtgacagccaggttttgttgccatccacttggcacctgcaacaggtaaatctgatggaaaacatgggatgcctggtgcactctgcagaatctctgttccttctccaaaagacagcaacaccagacctcctgcctcacgtcctgctgttagggttccaacactgtctggggtcagcagtcagctgctacagtagctgacctcactcagtgtctttgttctacagcctcaagccctctgattttggtagggggctttctctgggctcaaagcctccaggctgagtcttctctgttcacgaactgagtctctagcacattctctccaggcctctcctcaaggctgggagccggtgctggaatggaagcccctcctcctcctcaccgctgctcatcacatccttcctgcctttgttccagtccctcccactgctcctgggcacagcgtccatccgtctgacaccctccgtcttttcttgcttcacaggccacacagtaggtgcacactacaacagcacactgctgtgggtgaccccgcttgcacccctggccttctgtgctgaagcctgggcagctggtctgactcagcgggtgtgtgaagcccacaaaacctgccccttccaggaacacaaagataagcaaagcaggatttcaagtgatgcttcgagcattcgcttctcagctagggctggtgctggctgacagctattgatggcaaggcccttgctaagcaatggctgtgtgcatggccaagtgctaaacaccggaagcttagcagtgaagatcagtagcctgctctcaaacagggtgtgaatctgggtggagatgagcggggtggtgggggtgggggtgcagaactttgtggatctcagctctgcaggggtgatgtgggggcttcagctcatatgtcaagtctggcccactctcaacaggtccctagtttctttaaaatggcagcacacacgctaaagggaacaccctcaaggaatcttagagcaaggttcaaaatcgggcaaataatgacaccataaatgccacagtggttataaaacaaagcaaagctgtgtgtggtggcagcactttaatgccagcacttggaaggcagaggcagaagcaggcatatatatccctgtgaattcaaggccagcctagtctacatatggagttccagcacagccagggctacatagtgagcccctgaatcaaatcaactaatttttcttcttcttcttctttttcttcctcctcctcctcctcctcctcctccttcttttcaaaaagaacaaactgaagctaaagtcgtcatggggcatgttctggagaagagtttatgtcagacttaggtggaaatgactactgtgataattcaacaataccttaattttattatcttgtcctttttcttcagttaactttttcgcagttttggctttgcctttgccttctgaagttacccagtttagcttgttaatgagagccccatctcagcagcctcacagagacaatggacagtggtcggtctgagcccagagaagatgcccattgtgaccttccacctgtaatctctgtgtattttatttattatttttacgagttttgtctgcacatatgcctacaggccagaagagggcatcagatcccattatagatggttgtgacccacatgggattgctgggaattgaactcaggacctctggaagaacagctggtgctcttaaccactgagccagctctccagccagctgtaatctctaatgactcagttgtatgaaaagactcaagaccaggaaggatgcagctatctcggattttgaagcaagcaacaccaaggtgtgaagagcatggagtcttttccgtatagagcacagcaattcggccaaactcggcgagaccagcgacagaaaagaaaacatttataaaagctaccagtgtttttagcccattcaacaatcgctttgcccagatgagaaaataaaatgcaaactcctgaggtggagtactgtgcccattctgtttctaaagtcaatctccaaagacggcttcgcgctttcatacttgtagacatctgacaccaagttaaacaacagcacacagacagtgcacacgtgtgtatctacacacacacacacacacacacacacacacacacacacacacacacgtttatgaatggtaggtcttcaggtttgccgagttactgctgctctagtttaaaatactagaatccttgcaaaacaactttctattcatctctgaaagacacttactaagaacagaagtgcactgaagagcagctgtactacagccgtgtttattcacctttgcaaaatagggatgacgtttttaagtcatgggctcattcccttgcttcccttccaaaatgtattttatctgcctgctgctacaaagcaggccaaggacatgcacagaagtggctgagtgcaagtgcatcctgtttttggtttttgtttttttgtttgtttgtttgtttgtttttgagacagggtatccttgtgtagccctggctgtcctggaactcactctgtagaccaggctggcctcaaactcagagatccacctgcctctgcctctgcctcctgagtgctgggatcgaaggcgtgcgccaccaccacctggcaaacacattcttaggagcagagtttgttgtaaattcatttgcatggaggattatggtgacgactgccaggctcggcgtctggggtaggaactaaggtgcttagtattattctggcatctttttggtgcttctcacaatcaaaaatggaagattagttatgattttttcctgatgaagaaaagaatcaattattattacctcaagtgacagcaaattttagagggggaggggcatctttaatataatttcttacagaattttcttacagaaaataaattctgacagaattttctcctaaatcactctgagataaaaagctgtcaaatccagaaacttctgcctgctatcccagtccaatgtgtaaatgctgtctgccccagctgggcctctgtaaagatcacagctatctgctagttgttaggctgtttgtccaatgccatgctgccacgagaggctgtggacaatggcctcacacaacacactgtttacatctgtctaatgctctggctgaaaacaactcagcccacgacatgaggagtcgagggaagtctgagaataattgaatgtttgtaaaaattcaatcttcaaaacccctcagctctgtcttcatcttgcctccattcaacttgggctgaaatcgtcaaggatttcttcagcaagctgctgaagaaatgcatgacactcccacacttgggtgagttcttatcaagattaaagaacctcttgtctcatttctctgcatatctgagaaatcaaaccatgagactgcagactacagcacattccaaagtggcatgctagccatagcgtccttctcggtgttggtttttaaaaggcaatggtaactaactcttatgaaaagcttaccgtctatcagcccttctcttaatgctttgtgtgtgctattttatttaatactccacctgggttcacaggtagcattaccatctccatgaactgggcatctcatctcctgactggacactgcggacagctactctttatacaaccaaatcccattacttgcaggaagaaacacaaagggtattcaaagaaattaaatttgacagacagatgtagatttgaacctacaaacccttcaacacacaaaataaaggtgtgcacacccccagctacacatgtgtgtgtgtgcacacgcacatttgaggtgggctacataactgccaagcccaaacatgcctatggcttgtgatctctctagttaaagaacctggaagcagggcactttacatataaaattaagttaaaaatcttagcatggggcagggatcatagcagatttttcaagtggttccaatgtaatcacaggtcttccaagaacacaggagtcttgtgtggaaggagtggcacttgagagaggggagagaacaagaagggagagtggctggctttgaagacacaagaacggcatgtggtggtttggatgacaaaggtctctatgagctactatctgaaagctgaggtagtgccattgttggaggtgtggccttgttggagcaggtgtgtcacaggagggtgggctttggagtttcaaatgctcaagcaaggcccagtgtctctctctcttcctgcttcatgaggatccagatgtagaactctgctccttctccagcaccatgtctgtctgcacgctgccatgctaccctctgtggtgaaaatgggctgaatccccggactgtaattacagccagccccagttaaatgcttccctttgtaagagttgctgtggtcatggtgtctcttcacagcaaaagaaaccctaactaagatggggcccatgagacaaggcatgcaaaggcctctagaagacacacaggactaggaaatgaatacagccaacagcctccagagggcatgtacccctgccttgtcctgatgttaacctttcaccccacatgtgtgtgatggtgaatttggacatttttagacactgcggtgtcagtgaaccgggaagtaagacaattatgaaggacctgcctgttgcccaaccactgaaccagttttcccctgcaacccctcctgagtggtggaggagtctctctggtcagcatgttccccagcactacctcacacaggcttagtcgctctgctcccatccaccagcaaagatcactaagcatcaggtatttaagaagccagtggactccggggcaacctgtgctgtctggagacgcttgaatctcccacactgtcccctacaactccctggggcaatgtgtcagcaacttcaaacacagaagaagttggcttaaagcaaagagtcttacactcatatttctgtcttactttgtccttaggagatgtgggaatcagcaggataagtaagagctcggctgctcaataatccttctgacaatgtttccttgtatacttgcgcgcgcacacgcgcacacacacacacgcacacacacgcacacacacacacacacacacctctaatattttcttagaggtttatctgactctacttgtctggggtgctgtgttggctaacccaggctgtcaacttgacacaccagggaagaaccctaagttgaagaattccctccaccagattggcccatgggctcttgtgggtggggcgttttcttgattgctaattgatgtggaagggccccgcccactgtagctgacaccatcgaaaggcaagcagaccaggatatataagagaggtagctagctgtgcaagccggagagagcaaggcagtaagcagacttcctccatggtctctacatcagtttctggcttctgccttggtgctcctccatgacgggctgtaaaccctttcttcactcaggttgtttttcggtcagtgcttcatcacagcgccaaataaggaaggtggaactctctctctctctctctctctctctctctctctctctctccctctctccctccctgtaatgtttgcatggttgttttgtctatatgtgtctctgtgaccatgtgtgtgcctggtgccctcagaggccagaaaagagcattggatctcctggagttacagatagtcatgagcagtcatgtgtgtgctgggagagcagtcagggctcttaaccacagagcatctctccagccactacattgctttatttttctaatgtgtgctatagacataagtatgtgcatgcatgtgtggtgtcgaaggcggggcttaaaagagtccatgcatgtttgcccgcgtgtgaactactggggttttctagacaaaagaaaaggaaggagggagtagggaggctgacgtagtagcgtgaggaggatggggtagggagaacaggcgattaatttcagagccagcagcttggaagacactaaaacactctcacctgctgagaccagggtccccatgtttctccttccttcttttagaacattcggtattgatctgctctgtcaaactggaaggcttgtcgagaaaactatgttgacctaattgttctgcttggtgacctagttcatccgtgaagtcggctaagtgtcagcactgcactgagggccacaggagaacgactgcagatcctgaaaacgcccataacttatactcaaatgtgtaaggtctccttcaatcttacgtgaaaaaaaaattgctaaaattacactggtcacatttatcttaattatttgttgtccaaatatagttttaaatagtgcgactaaagcagaaagcattttgattagtaaatactcaattctatcaggatgtggggggggtgtgcgcgcgcgcgtgtgcgtgtgcgtgcaactgtaggtgttgcaccaccagttccagccatgtgttttgagcagggtctctcacctgtctagaactaacccaggaggccaggttgtctggccagggatccctatgcttccccagctctggaattacaaatgtttgccaccatgcccagcttttcacattggttctgggagctgaactcaggtgccaatacttgggtggcaagaactatagcaacagagccatgctaccaggttgatgcagggtttggaagcaaagccctccctgctgacaaccaatgttgcactccatttcatttttaaaagacatgctaagaaaacaagatccaatcaccctagactttcagggattagaaagcacgtgtctctactaacaaaaaccaaacctttacagttttaaaataccagaggattagcaatttttttggaaatactccacaaatacaacaaggtacttttatagaaaattggtttggtgcttaacataaaagtaggtagctacccttcaaaaagaagagaaaaacttttcaagatttctattttatatttaagcctatcactgtgggtattagaacacggctggctaccatttaatgagcaccagaactgtcaattttaataactgcatgacaatctgtaagttggtatgtctctgaatatcaactatgcacctgttaatacagctaaaaatagagaccagctattccccgtatttagagcaatagtgttatcttacaatacttgacacaatactatcaaaaatgacataagcataattctgacttaaaaacacgagccaacgtgcacagacactctccaccagctgttgcaccttaagcaaaatctaaacactgcattccaatcactcatcatctcacaaggtcatttggagatctgggtgtggagcttggtggtcagctgagcacccgagcaccacacgcagaggacctgggtttaattcccaggaccacaaagaaagtctttaagccaaacagtctgccagaacccaaagactatgacacgaacatccaagacagactgcagagcactggctaagacgcacatttgatccactgtgatctaagtgtccctcagttcaacacaggacatgaataacgtggctaacatgaataacacccacttatcatacagccagtaagaagcacttgtacaacggcctattgaaatccagacttaatcctttcacggtatttcaaatgcaaaatggagaagaaaggaaacaagtctacttccgagtactgaaagttaagggatacctcttccacgaagctgtctttcttctccagcatctcccgtaaggtctggaggattttaatgcacagtttttcttctttctccattagtttctttgtgtgattaatcagcctgaaagcaaaacatgaaaccttaaaagggacaccaatttctcatccaaacgtacacggtatgctgcgtgggagtgggggacagtgctgaaggcacaaggtaaatcagacacgtaatgccaaaggtctctaaagcttgtagacctcgctgcggtgtttatgtatctcagtgctgcccggcctcagcgagctctttggggggctatgacactctgggaaacagggaaacaccaatgttcccctttgctagtttaaaaagatttaaagcatactttacgtcatcatgtcatttattattttctattcattgtatcacattaattggaatatcatggatgtaggtgataccacagtttagtgggctttcccccattctctcggtaacgccatgtatgatacggtattgcttggtagatgtgagcggctgctgcgattagaagggacaagtgtagcatcaagacagcttgaccattgctgtaactcagacacaggaacggctccttccccgactgtgttgaagcacgcagtgtggctctcgaagactttcagtaccgtgggtggagccatcctgagagtcagtatcaagtggaacgtttatgattaggatatgtaactcagttcccatagactgggttgttaagaaactgaccctcccctgaccctgtgagacacgtcttcctagaggaacagcgtgatgcagaccaaagggaattatggtttcccgtgacacggcaagagcagcatgggtttataagtctccatttagagtgagtgccacgggatgtcactgagaagccatttcctctggctgatgaccagctaatgtcctcagccatcagggtggaggacctcctcactgctcatcctctccacaagccacaatcgggctacataactgtttgctgaggagaaaggagcctctcacagataacacaatttgcttccagttacacagtcctaatgaggaaagcaggaaatagatttcctagcccaatcccctgtaagtgctgccattcaccaaacaatctctggggcttcaggacacagtcctgcacacaacaggctgaacatagccatctgacatgacgagagctactaaaatgtaaacagaggtactggcaaaaaaaaaaaaaaaaaaaaaaaaaaaaaaaaaaaaaaaaaataaaacactgattggctgattggccaggcaggaagtataggggggactaggagatgaagagaattctgggaaacgtaggcagatggagtcgccatgtgagccctggaagagaggatgtaccaggctttctcgggtaagccaagaccatggggaaatacacggatgaatagaaatgggttaataattgaggcagagctagccaataagaatctctagtcactggccaaaattttataattaatatagcatctgtgtgttatttgggagctaaagcagttgtgggagaaggccggacaaaaatctcttgtaacacttgagttagaagatgttggacgggggaagggcaagaaatcaactctgaccaggaggcaatgtagacaaaccacgcaggtgggaggctggaagccatgtcaaaaaaatggtaaataaataaagaaggggtggagcttggactaaagagccttgagtgtgggtctgacatgggggataccagagtgtgtgcacactgtcccagaaattgtcctcactgtgagaaaggtactttgttttttttttttttttattttttcctaagccgtgtctttatattagcctctgccgacacagacttgatttccatccgtgggtctccattccaacgtctaaaaaacacagattctctttcacaagagcagatgaggatttaagtggacctaaaccagctgcctggcaggtgactggaccgattctctcatcccacagcatgtgactcagcagagtccaagtccttccctgaggctgtccccacccactcctgtgagcccatccggtctctggaggaaggagggaaactgattccactttgctgtggcttcattggcgtgccgggcacagcagtgccagggtgtggcgtggctagtaacagaactgagttctaggtttctagctatgcttgcaaatgacactcttggctcttcagagagatgggcagggtggggttagcagggacaatagtcaagctaagactctggccatgcactctgcctggttcagagggaaccagaactgatacactgcagcttctttagtcagttcccgccctcaccctcaccgtcaccctcacagtctagacctctgctatccagcaggactctagtgtagaactggtagatattagccacgtagagccatggagtgttagagctgtaactgagggggtggggtggtatctcattttaacccatctaaattttaattaatgtgactttgtgtgggtcatctgtccagggagttttctggcaaggatcagaaggtgggtgttctggactgctgcagccctctctcttccaccagaaaggtccctggtctggctccacttactttgacataaaggcgccacatcttatcctggcatcgctcccctccgggaacagcagctccggactgtagagcacgtcgactagcacggagaactcggcctgcatcatggggctgaactgctgctccagggatgcgacgacatcctgagacaaggcacagaggacccacatgagtgcctctcaagatggggctcgcgtaaggacattaaccagaaaggagacgcggccgttctgtgccagatgaaccctggcttcccacaacaccaaatgtttgctgtttacactcaacacaatctggtttcattcattcatattctctctgtgtgtctctctctgtctgtgtctctctgtctctgtgtatgtatatgtgtgtgtgttaaagattttttaaactatgtacatacgaggggaagggtatatagacatgagtgtgggtacccagaagagggtgtcagacgccctgaagctgaattctcgggcagttgtgagtggcctgggatccaaactcacattctctggggagcagtgtaagctcttaacccctgggctgtctccagccttacacattcttttaaatcaattcacaaggtaatggattggtaggtaacagtcaggcttctgagagtacatgagtaagagggagaaacagtgaaaccacttcacacactgtgtaaggagacaacttggagtggaccaggggtgcatatgagcaaccgctaaacatttcctatgtgtccctggtcacccagagctaagcatcttgtccagtagaaacactcactgatatgttactcaaagatatgagcttactgtgcatggtttaaggacattcaatactatttcaaattatatttattgataggtctgattggccacatgtctaacagtttcttttcatcccatccttgctaaaaaggaatctgggtgctatttccgaatcaggcgaaaatactctcacggagatgagccccctcactcagcatcaaggctgagggcttataatggccagggtcactctactttgtctgaggagaacattgcacagccctgaccagggagacatgttaagtcctaagtagaaagccaagatctattcagctctacaaaccttgcctagagatctagccaatgggtagacacgatgccaggttcctaagagacccaacatgcttcgttttccaggcctccaatcatcctcctgatgacagttaaaaggacaaagattctgtaaaggggcatgttcgtcatacaaaggggtgacgcttatcagagatggccaagctctggtgaaaccagtctgatttattatctattaacttccgccattggacaagcgacactctgacttgaggtgaagtcctccttccctctgagaatcagaattgccccacatgacatcatgacaccagtaccatctaggtttgctgcgggatttaaagcaagttctaaggacaatccttgatgcacactgcccccttcatttcagatggcagccccattattacagagcatgcatgagtcatgaatatcaccttcctattacatgggtggcctcttttccaccccaatctaactgctctacatgggacacacctttccatggccaccttcccctggattctgtgacaccatacttaattttccgctggagtcctgacccttcactaagccctgttggatcatggtccttttcctgctccagctacgtctcctgctgagactgctcatccagctctgtgggctctccctctttgtgcacgctagaacacccagggttgatatttccacacctctccagactcacatacccagctatctggccggcagccctacttcggcatcagcagaggcatctcaaacttagaatcccccaacagacctccaattctaagtccccacaagcttcctctctcccactgtctcctgccttagcccaggataaactcacatctaactaggggtgatccttgacccctctttccatggccccacaattcacccacccatctaccagaaaacacgtcccgaaaactatctgcttctctccaacgcagtttctgccttatttgtttaagattttgtttttaattgtgtctgtctgtctgtctgtctgtctctgtatgtgggcacatctgtgtgcaggtgcccatggaggccagaggtgctgtctcccatggagctgaagttgcaattggtgggagccacccaaggttaagtgctgagtcggactctggtcctcagcaggagaggagcacagtccccctctgcaggaatccccattcctatcacacttacagtggattccaactatcatgccagggtgtacaacaaatgccatgagctgaatggcttacagatggcagtttggttttcacaacttgggagttaggaatccaagaataagaaattagcagtttttatgcctatttcttggttcatgcagggtccatgtcacagtgtccccatgtggtagaaaggacaaacacaccactttcgggctacagtataagggaactaaccacattcatggggcccacctgcaagaactaattacccccaaatctaacctcagaatacagtcacatgtgacttaacctggagacaagacctactaacatagcatgagggcaaaatgagttcacatgagccaccagggtggtggtcacacaagggacagaaatggggacacaggtgtacatctgcacagaggaaagacccaggagaagcaggccatccacagtcgggaatggcagtttcagaggaaaccaaaccacactgataccaagatcggagactcccacctccagagacataagagaatacatttctgccatttgaagaatcctgcctatggtgttttgttgtggctgtcccagaaaatgaaagccacatgtcattggctcactgatcctaaacatacaggccagactacggatgaagacttgcaaaagggccacacaaggacctggtgaagagaaggacgggctgattttggcccaagggatataagggaacacacctgaagataaactgggtcaacactattaaaacctaatttatcacatgtgtcttttacagtaggttatttttactaactttattactgacattataattgtcttgcgatcaatggccactactcactcagaaaccaccagaacatgttgttatataactcattaagaagtaagtcaggacaatctgtccataaactgctaacgaggaggtggtggcagagagctacagaagaaagctttgccccaggaagaactggatattttcaaccatattgtatcacatgacacatttcaatgatacagaagctagaaaagagtaatgtctcttaatgtcctcattgtacctgtaacttctcgataatgtttctgtaatcccatgctggccctccaagagcttccttgaaccgaggtccagatcgagctgagagcctccagcccatggccgccctctgcaccgtacttgaatggttcttcatgaagagtgtgttaacctggccatccaaatccactgggattgcaataccacgatttttggctgaaatgaaaagaatagaaaaaaatatgggaagaatttccctctcaatttggttaaagcttttaaacattagccaaacacactaacaaacatggaagaaaattttcttttttaagaaagaaagaacaaatgcaagaaaggcctaactctttaaactttgccacaccatcgtctcccatactttcaggttaaaagctgctgaagctatttcagttcttcaggccaattagcaatgtgtgatcactgcaccttcaaaatcccttttgatttcttggtgattaatgtgtgagatggactcatttcaacatcgatataaaaaagcacctcaacaagcacacagatctttaccttcctagatgccaaagaaaataaaaactcagacagaaaacacacagccaaatccttccaagctgttaacttcattaaagggtgtacctgtatgtttacatgtgtatgtgtgtgtgcccacaaaactacatatgatcaaacacctgacagcagaaatagtgaaaaagttaaaaggtatctttaaaaaaccttcctgggaaggtggtacatggagcctgtcttttttccttaagacccacggacatatgcatcataacagatttatgtagccataatattgagcaatgactatgctccttgtcaagaggaaaatggaagtgttgcagcattcctaccagagtaaagcagtaactacaccattggagaaaaactgacccatgaacgattggacttggtacaggtctacccagtggccttggctacgctgggaactacactggtatcatctgagctactcaagaagcaacctgaatcatgggagaagaaggtcctcctccctctgactagcaaactcaaaagtctgatgcagctgttttcacccagaggaaaaagttggagaagcataaaaactcctctcaagaaagaaggttctgtgactgtagagtgtcaacagtgaagacttgcagagaaggattctgactgtagagtgtcaatggtgaagacttgcagagaagcagaacagagcttgacatgactgcaaagaccataagatgaagagtacgtggagaggcacatgggggtaggcccagcacaggaggaaatgcatggagattccagccagcaagaaaatccccctaacactcactgctgttccctgtctgtctcacaaatgcacacacatgtgcacacacatgtacatgtacacacaatacacagatgcgtgcacacaaagggaaggttcctatgtcatctgcccagcccttctcatagaattccaggtcaacctttcttacttctgcaaggcttacaggccaggaatagaccttccaaactgccagccccctgtgtcagtcattacccatgaccacacaaagacccagggatgacaaataaaaccattagcaccaagaacaatgacctcaactgaaaacaaatgttccacggacaaataagcaatatttaattctaattattgtccatacaaactttgagtagacaccacacctaaaaacgcttaaagagagggaaaaacgatcttggaaattaaatcatgactctaaaaataaacctttcaaagattaaatgaaaaggatgagaacaaaagtggtgagctggaaaaaggaagccaatgaatcatctagaacacaaaacataaaagaataaatggggaaataaagaggttgtgaaatagggagggccaatacaggaagatacagacctgacgaatgaaagttataaaaggcagtaaatgacacattggttataaaaaattaagaaaataatgagggtctggagggatggctcagtgattaagagccctggctgctcttgctggctggggtttggttcccagcacccacattgcagtttacaactgcctgtaactccagttcctgtggatctgatgccctcttatggccactcaaggcactgcatgcctgggatgcacatacagagaagcagatacacatctgtacacataacaaatcaaaataaacatttttaaagagaaatttcttgtgtctggagcagggcgtcaagtctctgaataaaggacacagtggttgtgaatgagattaaataagcacagagctttacattctggtgaaactgtggaatgttgtcaagctgaactacattttccaaagcaaaccttgatgtctgagttgtcagcacctggaaatgtggcctgatttggttacacgtgtcatcaagatggaggtcatcctgaattaggctctgctctagtccacattgactgttccatatcagagaataaaggggggcacagagggagaaacaccatgtaaaggtggaagagagacagattacgagctacaagccaatggtgccaacagctgtcagcaaatagcatagctaacagaaaggtcagagccagtcagttcctggagctgccaccaacacctgactgtgtagagagcttggtgccaccaacacctgactgtgagactatgaccctccagaagtgtaacccacatgtctctatggagcaactgagaatggcaacttgtgatggaacaaatgaattcaaagccaggtgagcacaaaaagcctaagagtgctaagagagaagagagatgcctgcaaagatcaagctggaagctgaattcctgtctgcagggctggatgctggaagggtggagtggaccacctgcccgtgtaaagatggagtgaccgcctgcccgtggaagaatggaatggaccgcctgccgacggacaaaaggttttgacagcagtaacctgtacaaaatttaactgaaactcaaatgccatcccccaataagaacattccagaacagatgcctgagaaacttttctctgaaactcctgtgcacagattatataaaacaaaagagagaaaagaatccaagacagtgtcaaatgaatagcagaaactatggcaactcagtctgagcttgagtaggagaacagggctaggaacaaacaaaagatgatttctcatgatgtgtacagcctagagcctccttcatcgaaaaaagtttagtcccatagacctcatttttgttgcaaatagttacacatttacacatcacaatttataaggtccaatgcagaagaattaatcatattccaaaatggaacacaaatcacagacatggaagccagtactacatccaacaagaagcagggagaaaaggagtgtagaggcaggatggggcttccttatgacgtcatggagctgttcagtcaagaaacacacacccacagaccctgtcagagttggtgacaggcaccagaagatgtgttctcaatctaaagataggaagaaagaacgtgaaagagaaggagggacagacagaggaaagggggaggggagaggaaagggggagaggaggagggacagacagaggaaagggggaggggaggaggaaaagaagatggaaggtgaagaaagataagggaaggggaaggaaagaggggagaatagggagacagaggctatagacagaaggggagcaagacagagaaaggggagggggagagaagtgagaggagagggaggaggggcgggatagaagagaggacccagtgaggaaagaggggtgaggaagagatggggaagggtagcctggaaaagagagagagagacaaaaccagactttcctgcacacagtgaggaaaatactagaccagactgttctgctgatgaaaattccccaccagaaagcacaactgaacacctctttaaaacaagtgatttctgctgccaacacagagcctggaaccaactgaaatacaagtcccagctgaaggcttcagaacgcaggcagctgggaacagccccctgacctagagggggctgcccagatcctaaaacagactcctgctgcccctgaccaatttccctttgaagcaagcagtgtctgtgcacatcccttatgcacccacgccgcaccgaggcgccctgaaggacaggcagcctccacactgctgagcaacgcatggttttatagactcttaatcttcctccacggccaaactgagacttctgttctttaccggctgtctcccacatgagcagcatttgctttgaacgtcctgaacacaggacggtgctgcttcagggtcactgcccaaccagtcctagagctcttcactgtcctcacaacatactacaaacagttgtcacctctgctcaagccacacacttatagtcccggcatgagccggatgcttcaggtggcagccacagtcaaaggacagtttgagaacacagcaggtagggctggagaagtggccgggtggtcacgtgtacatatttccagaggatctgagttcacttctcagagccgtgttgtcttcttctggcctctgtggtctgcacacatgtgcacagacccacacgcaagacacacatagatacacacgatttaaaacaacaataataaaatggtttttaaatagtgtgacatgcagggaaacgctggaggaataatttctgatgacgagcatgggaatttattcagtgatgagccctagtctcctgtgtgagtggttgcacacggcaatgtatgtccacccgtgatccacctatgagctgctgttccactatggtggcacacggagagatagcagaacaaactccaccatcctaaagtgtcaggtttttctgctccccaatctatacaactattgttgacctggtgtcctatcttggcatgcactgcagagtatgaattccaggtaaaataggaaatttcccaggctgagatgtaaactgtagcctatggttacatcatgactttgaagccataaaagaagattaactctgcgtctgagcagaatgcatttgagttaaaataaggtaagtgttcacacaacaatgaacaaacattgtaagggttgggaacacatctctgtggtaggacacgtgcccagcatgcacgaagctcttggttcacttcccagtacctcatgacaacaacaaattaaactaaaaataaacaaactctacaaacatggccttctgaaataggttctctgctctgtcaaaatgatagaggtattaatttgaaatcaaacagacaatgctgagttaagatgtccataggttgtttaaagggcaccaggggtgggggtagggggtccgaaaggaatgatgagcttggggaaagcatttgttttatcttgtttacacgagtgttaactatgaaagcatcattttcaggtcaaaaccgtgatccaaactgagttaaatgccatcaagctagaaacattctgggacctgtggtgtatacacagcaggctaaatccccacagttaacagcatcaaacagctagtggacctgctatgcccagacactcttcatgcctgcggcgtgtaatcagggtcacatgaaagttcttacaaacaagtgtccctcctctgcctctgagttagaactactgccttgttaaggacatgtcaccagaggacaggcgcccgagtccctaaggaacacgtgggagagaagaggtggctgcccatgcactttgctttgggggacctctgtctggagaaaaacgacttctaaaaaaacccaagcgacctttactaacaggtatttttattgcatggctaacctcctaattagacttataaatcctaaaactttcctggacatggcaagtcttttcaggggctctaagatgtaataaaaaaactatttctatttatacctcattaaatattgtgtgttgtgtgaatatttttaattagctggagtaactgatggtgtctgccagaccaaaccctctgaaaacacacataactccatgataggtgccacggaagaaaatgcttggatatgcacactgacaggcatgaggagaggtgagcagaaagagttagcattaattaggaaaattcggctggctgtcagcccagcagaaccagaacagctggagctgccggatgacgatgtgggcagaagcctcacctgctcttcagcaaacccaagtcccgctgataaatctgcatgcgtgcgtgcgtgcgtgcgtgcgtgcgtgcctgcgtgtttgtgtgtgtgtgtgtgtgtgtgtgtgtgtgtgtgtgtgtgtgtgtgcgcactcgagcgcgcacgtgcgtgcacagggttttcacgaaaaaggaatgtaatggttatagtaaattacaggactcaggcaattaacaggtaattatcaataaacaatttaaccacaaaagcttggattcccacctcccacttgtcaacaataaaagcttagtagtcctgcatgccactggaaagagagtctacagggagctgcagatgcagaggccagaagacaactttgcctctatttcctcggactccagctcatttttgtatgtagggtctctcactagcctggaatttggcaagtaggccaggctggctggccagtaagccccaggggcacactgatctctgcctcccgggaagtaggtttacaggcacgtgccagtgtcaacttttttttttttaatacgacattagaggttgaactcaggacctcttgcatgtgtttcacttactgagctatttccccaggccactggagtttttaaatagggacaaggttgagtatagacataagcttcctgtgtggaactcagctctactactcggatgccccattagtcctcgacttgaacaaagctatacgtcttacgttccctcaagaaggacctggctagtcatctggaaagacaaagatgagtgcacaccacgaaagctgtaagtacgtgtgttgtaggtatctcaaagcgtgtctctctccctccctccctccatctcccccccttccttcattttcctctctgtgagacaggaggaactcacaataagatgtccccagtctcctgagtgcagaggttaaagcatgggccaccatgctcacttccagggagcacaaggcttttcatagtaacgcccaaaaggtgcagacgatcagaatatgagaattctctgagaattaaggcacaactcagactgacagaagctattctgaaaatgaaattaaacctcaaaagaagtgggttgggacaatagcttagccaggaaagcataatgtgtgacaagcatgaatgtctgagtactgtagcccagaacaagtcaagtatggtggtgtacacgcataaccccaccacgggggacagagacaggaggacccctgggcttactggtcagcccgcctaacctacttggcaagttccagactggtggagaacctctctcaaagacaagttaccctctgacctccacacacctgctcacacatgtgcaaacactcacacagaactaaaaagccccagaagaattataaattcctcatgctagaagaaaaaaaattccaatgaaaattaaagaaaactggttaccaaacaaagagctcatttcctaatatgtaatggttggactcaaatcacaggatggaactggtcacagaaaaggaaataccaatggctcaattgtatggaatggttttcttccccacgaacagaagagaaaaaacacattaaaactctgacaatagttttactaagagtgacaaaatccaaacacgatgttaaggagaaaggcattctctggctttgctgctggttaaggacaccgccagggtagccattttcataacaaagaagggccactcaccggcattaactttattcctccatgttggagatgactgcaaacatcagatgtttgcaaataggatgaggttgggttagcatcacacaaaaggacatgtctctgcgtcgtgcactttaatgttgcaaatgtcacagactctccacctgcgtgttctgagtgccatgaaaggctctagaattttctaacagatagggcccccagccttacacttttttctgctttctttacgtggtctgtctacctctaacaccctagaaactcagacctaggaaatgtgttcagtagaggggatttacttcagctacaataataccttccagataacaaggaatcattaaacaatcagttacattaatatgtgaaaaatgtttataaaatagttgctatgttataacttattgcaaattaactgtttcgtaacacagtggagttcacggaggtgattttgttttgattcagcatttggtttcctgggcctctcttctgcattgttcaggacagaaacctgctcacaggaggcaagcactccacccctgagctaacatcaaactccttaaactcccactacaatgcccccaggggattaaaatagacatttatttaattcggactttctaaagggttaatggtttttacattgctttctttttaaggatggctggcttgaagtttgttcactaggcaaaaccatttgtaaaaggcatttcatgcgatttccacgtggaaagtcaatagtgtggccaaccaactacccaatgttaatctctgcaggtcacacgccaattatgagacacatgggcagaattctttcccaagtgaaatgatacagaagtcattcatagacgcgtttgctggaagccttcctgccatgtgtttttcaggagtaaatcgaggaacagcatctaaccaagtgcatctagagatcccaggccttgacattcctccacatattcagcaagggcttaccgctcccagggaaggaagggatgacttaatgagtgcccctgctttcttcttgcagctcttacactgagtgcataggactggaagatgatgaagtgtttttgataataggtttagctaatagcactagagagcacttgagaaacaggtgctccacacacgtaaactataatggatatctgcatttacgaggaatgtgcttaccgattcccaaatgctttataaacatatcatctcccccaatcttgtcatatttcacagatatattattctctattctcctaaatattgtgcattcttaaatgtttgagttgtgccagatttcagtgttgctatgcattttgaaaggaagcagaaatagaaatgactgtgtatgtggcagcaaagcttcacatgggtaccacgggggctgaacttcacgggagtcactcttgtagactgcctgatgtctcaggagacctgacctaaccagaggggtgttcactgagctcaggaacaggtcagttcccaagagagatgagagactcccagcaaccagctgtgacacactgtggaactgtgacacactgtgggtgtccctccccgctttcccgttgtacagaaacagctggcccattctgtgccctgcctccaccttccccagacccttgctctccaaagtcccaaccttcacgcaagtcataggaatagtcattctgttgatgaagagatgccagatcctagaatggcatacaggttaatttgacctttgtctcaaacttgttgtcatgttgcgttttgatacgagcctaggtgacgtcaccatagtccatagaccatcataagtcaacacatgcctattgtgacggttaacgtctcattgttaacaggacttagaaacactagaaaacacatttgggtgtgtttccagagatgtttaagaaagaacagacccacgctgcacagggtggcacagcctgtcaactgggatccccaaatgaataaacaggaagtgggctgggcaccaacatcctctcctctctctctctctctctctctctctctctctctctctctgcctcctggctgtgcgtgcaaggtgaccagtggccacagctagagacacacttatcaccaggccattcccactacaatgggccgtacacgtaaaacaccaggcaaagacacaccgtgccatttctgtctgaagttgttcttatcaagcattctatcacagtgatgagaaagtaacaaatatatttattatcctgcttatcagaagtaggtttgcaggccccgatgacaaattattatatatattattataaagtccctgtttacagagtctccattccaaatgaggaaaacagcaaaaaagtgagaaacaagagatttcaaacagtgacgagaagcaggaaggaaagcgtgagaggtgaagatggtgtgtgcacatgattgtactatatgactgaacataaactctgaagacatgatagcatggctgatgtgacatgggacacagtgatgtgtgaagagctacgatataaaaatatgaagtgatctgatatatggagatgtaatacgatctgagatatgctatgattgaaaggcacactgtgatatggtaatatgattgtgatgtacagggcgatagggtagcatgaaattatatgatacacgcgtgtatgaaaatacatgatcgacaagacgatgaaaaatgctggcatgaagacatcatgacataactggatgatatgatgggatggtatgacatagtgataagctactatgacacgatggtatataacatgatgtgacatgatgctgtaggacatgaagatttgacttacgatgctgatgtaatatgatatggtgatgtatgatactgaggtgatatatatgacggtatgtgatacatgatatcacatgatatgatgacaatatggaatggtatagttgtataatgccatgatatgatataatctataattaaatgacatatataataacattatatattaaatgatggtacaatacgaagatatgataatatattattgactgatatgctacaatgcaatggtgtgatgtgatacaatgatacaaaatgaaattatatgacataatatatgatatatgatgatatatgacatgatggtatatatgatatatgatgatatatgacatgacggtatatatgatatatgatgacatatgacatgacggtatatatgatatatgatgacatatgacatgacggtatatatgatatatgatgacatatgacatgacggtatatatgatatatgatgacatatgacatgacggtatatatgatatatgatgacatatgacatgacggtatatatgatatatgatgacatatgacatgacggtatatatgatatatgatgacatatgacatgacggtatatatgatatatgatgacatatgacatgacggtatatatgatatatgatgacatatgacatgacggtatatatgatatatgatgacatatgacatgacggtatatatgatatatgatgacatatgacatgacggtatatatgatatatgatgacatatgacatgacggtatatatgatatatgatgacatatgacatgacggtatatatgatatatgatgacatatgacatgacggtatatatgatatatgatgacatatgacatgacggtatatatgatatatgatgacatatgacatgacggtatatatgatatatgatgacatatgacatgacggtatatatgatatatgatgacatatgacatgacggtatatatgatatatgatgacatatgacatgacggtatatatgatatatgatgacatatgacatgacggtatatatgatatatgatgacatatgacatgacggtatatatgatatatgatgatatatgacatgacggtatacataatacaatatgatgaggtgatgtatgagatggcaatacaatatgtaacacatagcaatgcaatgtgatattatacaacaatatgaaatagtacaatatatgaaatcatgagatataattgaattatatataatgatacaatataacatgatgtgaaaccatgaagacattatatattattgaacggtatgctacaatatgatggggtgatatgacacgatgctataaatgaaatgatatgtgataatgctataatatgccatatgatgatatgacattatatgtggtgtgatggtgtgataatatgaagatggtatggtgtatgaccgtgtgtgacatcagcttcctatggatgtcttttttaggatttattttatttttaacaactgtgtgtgtgtgtgtgtgtgtgtgtgtgtgtgtgtgtgtgtgtgtgtgagtttgtacgtgttactgcagtgcccatgggggccagaagaggacgtgtgatctcctgaagctggggttataaactgttgaaagtgaccagatatgggtggtgggagcagtgcccaggtcctctgcaaaacacgctcttaactcctgagccatatttatgcgtgtggtgacctaagctacaatcaaataaagatcacaaggggagtatgaacagtgaggagagcccatcgtggagatgaaggaaagaaatggcttttgtgaagaaattttaacagaaatattttttgttatttgagatggggtttcgtgtagcccataatatatagtgtaggctcgacttaaactcctgatcctcctgtctccctcacaaatgatgggatcacaggtatgtcctaccacagacaggggttgtagagtgtaagacagaggggtcaacagaagaggaaggtgaaggtcggcctcgagagataaaacagacgcggtgccaaagcttgactctgcttcgcttcctcagctgacgatttggatagaattgttttaagattttttatcacacgtgatctttgaatacacaaaaacaaaaaggagccaagtttttctgaaaaaccactcagctttggctactgcaaaatgaaatcttaaaaataagccgggtgttggtggcacacgcctttaatcccagcactcgggaggcagaggcaggtggatctctgtgagttcaagaccagcttggtctgtaagagcgagttccaggacaacctccaaagccacagagaaaccctgtctcaaaaaaacaataaataaataaatatgcattaggctggtgtggtttgggtgaccatttgagctctgctatccttccatgaaggaacggatctgactacaaaccgaacccctccaggtttgatttaggtggtgagcacacatgaagttctccagctctcactcactcacccttcattagctggcttgtctgcaacaggggctctctctgtctccttgaatttgccatccccctgcatcaccctcccacggggctaggattacagtaccctgctccatgcctgacttggtctgcagtttctcaatgctgtgtgcagcactccctccctctgagggcttggtagggtatcagctcccactgcatctgctgaatgctaaaagaggaaacagaagagagaggaagagagagaaggcagagaaatctagaaatataatctctatttgcttttcctctgatgatgcattttactgattgatataattgatataattcctaatttgggaaaaaagtttactgttttattataacttggaaagcaatgtattattaaagattcagaaattatgtcaaagcatgaacaaataaaaaggctcactgatcattctagcacaaggagttgtattttacataaatacctctgaacatagtgctatgtgtatcttttaaaataaagattagagtatcattatggcttttacacattgtgtgccgagtctctccctccctgtgtgttccttcccttgcagagtctcttggttctgaagacctcagggggagcacagtgagtactgtatggaaagtggccacgatccagagcaccggagcccagaaaggagctccaagtctggacaggagggctgatgcacaggacagtcagagcttgagagtgaggaggtcatgggggccaggttcagccaggctcaggggtacaggtgaaggtcctcacacaacagagtgacgcaggatagagccagaggatcagatcaaaacaaaaccataaacacggtatagaaaacatcacttgctataccagtaacaacgctaaatgcttcagcattgacttaagaaataggagaggaataaaagaccctggagcttgtacacaaatggaggaagaaaatctcaggacaccaggagggaagggaggaaaggaagagagcttcgatgctctgcaatccaaggcagaacctcagagggatgcccaggcccaaggggcatgtgtgccaaagaaacagcacagtagagattttatttataattacttattccatgtatttataagtagaattcttatttaaaatcaattccctaggcaaactacattactattaaatgcagtagtcaccaactgatactcctagattatatctgatttttcatttctgtaaaattgctgccaccattaagtttttttttccaccattaagttttgttactataaaatctcttaggccagattgcagactaggtgaagactaaaaatattttaatgctcataattagctgaatcattgactgtccagcacatactattaaatcatatactaaactcccgaccaagatcattgtttcctgaatcctgaaatataaataaccaaagaacctatcaaaggttaaggtgtaaaagcccttgtctttggtcatggtaaatgctcagtaaacattaacagtggccaagaccatggccatgaccatgacaatgaaaacatgggatcaccagcaatcgccagatgcctttctagtttcctttttatcactattattttctacccatccaagcctatatttcttctctttcctccacttcatccataattaatctacacggctaggaagatggctcagtgcttatggtgtaagcttgagaacctgaatttgagtctccattatccacatacagccaggtgcagtggttcgcatctgtaattccgtactgctgcagtgaggtggatgccagcacccctgcagtgaggtggatgccagcacccctgcagtgaggtggatgccgcatgcaggggaaagcaacaaagaaaccttgtcctaaattaggttgaaggcaaggaatagctttgaggctgacctctgacctcaacatgtgagccatacctgcatgtgcctgcacatgcgcacacacacacacacacacacacacacacacacacacacacacacacctattatgcacaaaattatataataatacaaaactacgtaaggcatgactttgcacagggggagaatctatgagagtttttaggctcacttccccttagtttaaatcccttgtctccattcatgtataatgtcgaagccttcagtgtataacaggcctttgaatgattcagatttcacacaaattacaatgctaaacaaaaactcaaaaacgcctgttgccacaaaaagttattaacaacatcaggctcttactaataacttggcttattatttattattaattatttgttattaaataaatttaattggttccacaattaaaagtaagataaccagttaaaccactcttacaaaatcctactaagccatatttgaagtagaacactactttgaaatttggaaacaggaatatacttttctcccaaaactgccatgttgagaaccagttgctgaacgtcggcctccaacttaaacaacaaacaacaaattgcctggctttacttcttcgtgaggtctagattgggaagctgcttgaacggctctcagccccaaccccagttactccaggaaatgtgtatctgagtcagcgcagaccccactcacccacttcagccagcgccctgatgcaggactccaccgaggccctctgggctgggttgggccaggtacagttgtagattctgaatgcagactgcagcagctggatgaagaccggctggtgtgtctgaaacagaaggcactggtcactctgtgtcactgtgccgccatccctaagtcacaccatgcctgaggagggagcagagctacaccttatagacaggaccccaaaaaataaagtaccaacagtgttgtgtgcttcaatgccacccataaacacctgactccacaaactgtcttgtgtgttacagcatgagaggaaacacgccaagcactacagaaaattggtcacttgtgttttcactatatttgtgtgtgtgtgtgtgtgtgtgtgtgtgtgtgtgtgtgtgagagagagagagagagagagagtgtgtgtatatgtgtgtgtgtgtaggctagaggctggcctcagctatcttcctctgtcactctccaccttatattggtgagcagggtttctcactgagcctgaaccctgtttggctagaccttcaggccactgagcttcacgtccacctgtcccttcaggggtccactaccacattcagtggagggaaagccaaggtcacatcttcaagatgttatccctcacaccaacagaccccaaaagagacattaaaccttagacattcggaaattcatcaaataaaaccgtgtgttgccaacttacaattcttaatgaaatgtaggtgttatgtaaagaaaaggttatttagagactaatgaccaaaagctgcacatgttcaccacacaaattttctgatactgtcgattgtgggttggcaggatctgcaggtaggaactcacggacaccgggctgagcatttgtgttctccacacaaacacaactaaatgatacttcatgtgaccctgcggagctacgctgagaatcacttttcttagccattaattttccttttgaaacacaaattttagcaagacaccccacggatacactgtaatgtgtttggctgtctccttatctgtggacatttaacgtataaaagtgcaaatacttttaagtatctataaagacttggaaaccataatatgccaacctttaggataaattactaacatgcagcagctggcccaggtgcccacccatcggaacaatcagccattatttcaacagttggcctctgcatacagttgtgaaatatcttgtagcgtatagaaagaggaaatgacctagttttaagaggtctctcaatgttggagaagagatcagctagtgggagagacggtggaaggacatggggctgtgatctttcaatctgattaaatgacgcgtaaactggattctttgctcaagcgcaaatttcaaagtgactcggaacaggcaaaatggaaaaagctaagacacataaaacacgtgaaaacagccgctaaaataaagtttggtcagggcagaagggcacaatgtggagaaatgcaagagacagcgattatcccgagtggcagaaaggacatccgagccaggtcacagcttcccggcgcggcgcgtgcggctacctggaggctggcactgttatccgaaaagggcgagttgaagaagccgctgacgatgttcatgaccgactctgtcacacacctctccaggaagacgtctgcgtgtttcctgtccgtggtggtattacagacctggagaggaagcaaagcaaagcacgcctctgcattataagttggtagcggaaccttctaagagtttcccagagttctgggcttgcagagctccttcagatggaaggatttctgtccaaacccactgtctgtggcagcttcccctccaagcctcgatatcatcccagccttcactcctccaggccgtgttaacttgctgttttctttatttttgcacgccaacctctcccttggtccacaaactagattttgatgaaaactttccactccctgagaggaagcagaagagttaagagccatcctgagtacaaagggatggatgataagaatttgtggtgagcctgggtctacacacattttgccttgtagtacctgggccccgtgaagaggcgttgagattcacatgtggtatgtcctctacgggccgatgggttcaaacacgtggtgctgttttgaacaacgtggaggcatgcccaacatttccatgtgttgccaggacaccgtcatctataaagtttaccctacacatccatgctatccacttaaagcttatgaattttgtgttcacagccacaggtcagctgcagctgtgaagcagagacttcctggagcaggtgactcattcactgacatctgggcactgaggttaaaagccccacccactttctgtcttttctctgcttcctgattggtcaaggtgtgtcaagcccaggctgcacaggtctgcccatctgctgtcacctgctgtcatgctgtcccctctatagattgcaccctcaaactgagctgaagtaagccccgcccccaagtgtcttctcaggcgtttgatcacagaaataggaaaagcaactaattcagggtagaaatggagaaataaatctaactccttcccacacttttttaaccacggcctccgcagagcaagttgagggcaagactggtactggagctggggggcagacagaccctgccgcccttgctctgattgttacatctgactaaatcgggccctttcgccaaactatttccaaatgtcagactgacaaattgcgaaagctaagagttatgattgaaaacacaggaaatatggacgcaaaacgacgaggtggggggagcagcgggtgtgagaaaagactggaaaccgaggcagacaaaggaaacaaatacagacaaagggtgagaagccagggatggcgcccatgttttcctgatgtccttgggcaacacaaatttttctgtgatttttgacttttcagtaaggtgcttcatcaaaagaacaagtggatgtggtttaatctgatgccactctacaacttttcacacaaattcataaaagggaaaacttctcttctcaaaccatgcattccggtccttctggcttggagaaccgggctgttaagtgtggaaggaaggaaggaagggtttgtttatgtcctaactccctttccatctcttcctccataaatgacacacactgacataatgttcacagaacaaaaaagggtttccatgtaactaacattgtcagaccattggggagaactgtatgatttagttaaaggaaataaattatgtctaattatggaattttgacattgtcccagcaagcaacagctactgcatgaagaagatgttcacagcagtccaacccctatccacaggggctatagcccgtgactgcagaacaagtaccaaatcctataaatcatatatataaatatgtatatatatatatatagctgaaagatatatatatatatatatatatgacaaaatttaattcacaaatgtggcccagaaatagattaataacataaattttaaaattatattacaatatgagtgaatgtaagtgaatgttttcttctctctcttctatctttcttctctctctctctctctctctctctctctctctctctctcattccattcatcttttcacttacaagaagcaccacacagatctttggcacacatgagcttccatcaccaccactctatttgggtctctgactgagtaaatcgaggatcacctggacacagccactgcagtgactgtggagaggtgacacagagctgtgacgtcactaacatttctggaatctccatctcttatttttgagcttctgacaagtgacgacatgacaagaaactctgtatgagagatgaccactgaggaagtctctgagataagtgagtcccatatatgactcttacttccgtctgcttaactttaggtttggctgtatttgtgccttacactggggattaaaatcaaacatggtcccagaactcctatcaagctgatttgtccaggacaagcatcacttaggattttacttctttctgcctcttccaaacactgaatattccttatggctaaaactgcccttttgttgagcaggtggcagaccagcgctcgcgctccaccatcagcctgcaggacctttgcccacgcagtgggggatgggatctcacactggacttactgtacatcgtgctgcactgcttggaactagacactggcaaaacaccagtgagtagagtaacggaagttacctagatgaggctgtactcaaaacctgggtaatgaaaagcctgtttcccaaaccacggggacctattcctatccaagcttgaatgaaagcatcctcactttacatcctacactggtcctactgagagtagtcagcaaatggaggaagactcttttattgttacaaccttgaaaaacttaccaggaaacaaaataaaacagaaaaaaaaaaaaactaatagtgtgttctttatccagtcttaaaatttactgttattgcctctttaataagaccaaaggttggaagtggctcaaaatgacatcacaacaaatgacctttttatgtatgagaggtgacagcagatgggcagacctgtgcagcctgggcttgacacaccttgaccaatcaggaagcagagaaaagacagaaagtgggtagggcttttaacctcagtgctcaaatctcagtgaatgagtcacctgctccaggaagtctctgcttcacagccatatctgacctagcctcccgagtgctcacctagcctcccgagtgctcacctagcccttctcacaccttttgacccacccacacctctagaatgagccttgtgtttctcactggaattaactactatacctgcaggttataattatttctgtcaatttaataatacctaaaattactttatttcatatatcttgcactgttccttggtttgctttccatctctgtgataaagaccacgaccaaaagcaacttggggaggacagggcttatttcacattgtagatcacagtccattactaacagaggtcagggtggaactcaaagcagggacctggaggcaggaactgaagcagaggccatggagggatgtgctgctgcttactggccttctctccatggcttgctcagcctgctttcttatacagctcaggactaccaggccacaggtgacaccaatcacagtgagctgggcgctcctccatcaaccactaatcagagaatgcctcagagacacgcctacaggctgctctcctggaggcatttgctcaattaagagtccctagatatatagatatgtctaggtttgtgtcaactaacacacattgtttacaggactggacatttttcatgtagccatcccagtcatgtgttctgttatgcataagcaactcaaacccaccaaaccccaaccctgccgtactgatcagcacagctaagcctagatacccgggccctgcagtacagatcaacaaagcttttaccacacccagacatccaggcactaggaggccactgtactcacaatccacattcccccagctattgctcaatctggtgtcaggtcctgaccacaaacatatggtgccaattttgtgagcatgaagaatataaaagttacagagctgaggggccttccacccagatttcaaagaaaagcctgggaaggcaggctacactgggaataaagggagggtctctacaggcgggtcctgaaatggcaatgtgtggagctgaggatgaaacctaagcctctctagacacccaagaacattagcgataccaggagcatctgttgagcaggtcacaggcacatgggctaaaatggcaaagcaatatgggtggggcctccccaccctgggaatccacagcacactaccgcttgccctgaaccagatacacagctacagaattcaatgcttgccctgctgtgtctcagtcttgctttggtaggctccttccttgctgctcctatcccaaccttatggaatggaagtatatgctctatttcactgtggaagtatgcaacattgattccacacaggctcacagctaagagtccttccttgggcctcagagaaaactctgagtttggactctggagtgacattggaactgttaatgccatggaaactctcagggatggattgagggtatcttgtgttgtgaggtgggcatgaaaggcgtgttaaactttgaatataaaatatccatctaaaaaaaaatccatccaaagtctatttgtagttggcagtagcaagcaggacccaacaggaggacataggtcacctggggttattttttgtcctctcttttttctttccctgcttccatgacttatctgtcataaggtggacagctgcttcctccacaagccctcccaactgtaatggatgaacctccaaagctgtgagctaaaataaatcctcttctaagtgctttatgccagatattgcccatggagacaaaaaacaaaaataactaaaccagtatctgacagtagaggaaggacaggcatgcagattctgggccaagcctctcagaaggcagagatgctggaatgaaagtgcccagagaagcagaacagagaccactgtcaacaggacagagagccagctgcaaggagagcaggaggctaggaagacatgaggaaggaaggcacagaaaaggtggaaagtctcggacaatctcagggaagcagggacctgatccaaccctgacacacacacacacacacacacacacacacacacacacacactcctcctcctcctcttctccctccagatgtggacagatatgacataagagttcagaactggccaaattaatggcattttagaacccacagccttggtgaaggatcagattcagggggtacaaagtacgatttgcaaatgatgccaggatgtctgtctggatgcaaagtgggagcgctggaactgcccacaacttgagaaggggcacacagataaatggaaacgtcaggtaaacatctagactcaagactctacatcagagaaggacttgggcttcagtcaacctgggatcaatatttgagagttgctgatcccaggaagcaagtgcctacagacagtgaagggaccaggtctagggtttgagtctgccatacctcaatatctggaagtgggaagataccgagagatcagtcaagtggcaggggagtggccaataaggtgaaagacacatcgacagacagacagacagacagactggctgactccgggaacacagataaaggacttaaggagctcgatcagtaaagtgcttaccttacaggcttgccttactagttcaagcctcagaatacatcttaaaaatgagaaaaaatcagcttggtatggtggcacacacatgaaaccagtgctggaggcagaaacagggaggtgcttgttcactggctggtgacagactcagtgagaaaccctgtccctaaaactaagatggatagaacctctgaagaatgataccccaggttgacctctaccctccacacagccattacacacacccctgcacacatgaacagatacacactcgggggagggggttagaactgatggactagaatggatactgccgaccacatgaagcactaagcattcagggaaggacgagaaacaacataaaactgggtctgcaaagttaccactgagcgaaaggtgccacagagggggcaaaatctacagaagacacgtctccagtccctgccacgatagcttcttgggccacataaaaagaacactttcaagtgaatcttattaatgtccattcaactttttacaaaattgccggacattggttggtgacccacacctttaatcccaacacttggaaggcagaggcaggcagatctctgtgagttcgaggccagcctggtctacagagcgagtgccaggataggctccaaagctacacagagaaaccctgtctcgaaaaaccaaaaacaaacaaacaaaaaaatcaacaaaatcatagcacatctgcttagtcctgtctaacaaagaccacgcagaagcagttttatggcagacacacattctccccatctccaaacttctgcttggcaggaaagggagcgaatggcccaagcaatctactgaaaacacggtatcctggtctgtcttgttaatcgatgactgatatgacactcagtggacacacatcctatattatttcttggtctaattttgttctgtcaggacattactcagagtacagctggtggccgtaaggtctccaaagggatagccaaggcggaaacatcttcaaaaaattacacctacagtctgagactaacaccaatcatcacccaccccttctaggtggcctcctgataatggcccgagtcccctgactgcaacaacaagcagttaccaagacgaagaaaaccatttctgccccacacgcacaggtttcagctgcattagaacatagatcaaagtgggccgccattaacagtctgaaaggcagcaacaacttcttctgggtctaatgacttggtcactgccccggtgtgctgttttacagctcatgggccccgtctctgtcgggacatcagaaagatgaccacatgagacaatataacacagcgagcttattaaaagctatttttcaggaaagattttctgtgtgtctttcaaaaatgatttttacatttattaaacagctttgccggagtctccttctaccacatgtgttcccaggctcaaacttggcagcaagctcctttacccgataaagccctttacccactggaccactcctgtgggtgcttgccccttatgagggataaaggccatgaagaggaaaatggaagacacaaacagtagtgactccagacggctttctgagaaccccaagacctggtagtgatgactacagaaaagtgtgggaaggaagcagaagccgcgtggctgctagctttgagacttcatttgtctttttagataaactcttctccgagtttctaccgaaatacaattgtgcaggctcaggcaggctacggagaatccaaagatacggaaacagaacatcggacacagcccaaaagagaaccagtatagggcatgggcaaaacactggcagacacgaaggctaactttgagaagctgctggagctgggggttgggatggaagccttccttcccaggctataacaagcaggggggtcagctgaaaattatgcatctggactccaggagcaaaattatgaggccacctagaagttttctaagtttcacagctttatagtttcaaagtaggcctggcaaggaggactggtgactcgtggtatatgttacacctttgcttgactggactgccccatgttgctgctcaggtaaaatcagggtaaaagctataataaagaaaacttggagtcagtgtgagaatctttacattttaagttgtgtagaaataaaaaccaaagcatgctaaacataggaatggcatcattttagaaatagatgctgaaaactaagactggacaccagccatgagctctcctctttcacccctgccatgttgggtgccctcaacccagcttccagcacaactcttcaccagctccttctctctgatggcaatcaatggctccggggttttaggagtttgctgttcacacctgagtctgatgcttttccttgacagcagtttgtatcaagtgatgtctgcacacggcttcacacagacctgaatccatgcatgcctggcttcttgcacacctggtgtggtggtttgaatgaggcctccattggtcatagggaatggcactgttaggaggtgtggccttgatggtgtaggtgcagccttgttggaggaagtgtgtcactgaggggtgggctttgaggtttcagatgctcaaccaggcccagtgtcactttctcttcctgctgcctactgatctggatgaagaactcgtggctccttctccagcaccatgtctgcctaagtgatccatgctctctgccacgatgataatggactgactttctgaactgtaagctgcccccaattaaatgttttcctgtataagagttgctgtggcctcctccctccacctcatatatgatttttagacatagagctaaggatcaccagcctacaatccacactgccagaggagctaggaaacaaggaggaccccacgagaagattgcatagtcccttgaggaaggggagggggacaagaacccttaagcaaattgggagcacaggaggggggagagaaaggaggtgggaaagggagaaggggtgggggaggagaacaagaggactgagatgggggaggaatagaggagggcaagaagggagatgccttgatagagggagacagtacaggtttgaagagaggtctggcacaggggaaatgttaggggatccacagggatgaccccaactaagaatttaggcagtggtgaagaggctgcctttgatgcccttcccctatgatgaaattgatgtctaccttggttaacattcctagaacattcatccaatagttgatcgaaacagaaacaggcacccacagctaagcactgaaccatactcctggaatccagttgcagagaaggaggagggatgagcaaaggagccaagacagggctggagaaacccacagaaacagttgacctgacctagtgagagcatgcagaccctagtcgtaaagccggggaaacagcattggaccaaaccaagccctctgaatgtgggtgccagctaggaggccaagacagtctatgggacctccaacagtggagccagtgtttatccctagagcacaaatgggcgttggcagcccattccctatggagggatactattgcagcccagatacaggaaggagggtctaggccctcccctgaatcatatgacagacttgaaggtcccctgtggaggacctcactatctctggggaggaggtggggggtgggttgggtgttggtggggaacattggatgggagggcgagggaatggggggatggatatgtaaatatgagtgcctctaaaataacaaaaagaaaaaaatcaatgaaacaaagagatggttctttgaaaaaaatcaacaagagagacaaacttctatccaacctaaccaaaaggcacagaaagaagatgcaaattaacaaaatcagaaatgaaaagggggacataacaacagacactgaggaaatacagagaatcaccagataatactttgaaaacctgtactccacaaaattggaaaatttaaaggaaatagacaattttctggatagatatcacttaccataattaaatcaagaacagataagcaatttaaatagacctacacaagcatgagagatacatnnnnnnnnnnnnnnnnnnnnnnnnnnnnnnnnnnnnnnnnnnnnnnnnnnnnnnnnnnnnnnnnnnnnnnnnnnnnnnnnnnnnnnnnnnnnnnnnnnnnnnnnnnnnnnnnnnnnnnnnnnnnnnnnnnnnnnnnnnnnnnnnnnnnnnnnnnnnnnnnnnnnnnnnnnnnnnnnnnnnnnnnnnnnnnnnnnnnnnnnnnnnnnnnnnnnnnnnnnnnnnnnnnnnnnnnnnnnnnnnnnnnnnnnnnnnnnnnnnnnnnnnnnnnnnnnnnnnnnnnnnnnnnnnnnnnnnnnnnnnnnnnnnnnnnnnnnnnnnnnnnnnnnnnnnnnnnnnnnnnnnnnnnnnnnnnnnnnnnnnnnnnnnnnnnnnnnnnnnnnnnnnnnnnnnnnnnnnnnnnnnnnnnnnnnnnnnnnnnnnnnnnnnnnnnnnnnnnnnnnnnnnnnnnnnnnnnnnnnnnnnnnnnnnnnnnnnnnnnnnnnnnnnnnnnnnnnnnnnnnnnnnnnnnnnnnnnnnnnnnnnnnnnnnnnnnnnnnnnnnnnnnnnnnnnnnnnnnnnnnnnnnnnnnnnnnnnnnnnnnnnnnnnnnnnnnnnnnnnnnnnnnnnnnnnnnnnnnnnnnnnnnnnnnnnnnnnnnnnnnnnnnnnnnnnnnnnnnnnnnnnnnnnnnnnnnnnnnnnnnnnnnnnnnnnnnnnnnnnnnnnnnnnnnnnnnnnnnnnnnnnnnnnnnnnnnnnnnnnnnnnnnnnnnnnnnnnnnnnnnnnnnnnnnnnnnnnnnnnnnnnnnnnnnnnnnnnnnnnnnnnnnnnnnnnnnnnnnnnnnnnnnnnnnnnnnnnnnnnnnnnnnnnnnnnnnnnnnnnnnnnnnnnnnnnnnnnnnnnnnnnnnnnnnnnnnnnnnnnnnnnnnnnnnnnnnnnnnnnnnnnnnnnnnnnnnnnnnnnnnnnnnnnnnnnnnnnnnnnnnnnnnnnnnnnnnnnnnnnnnnnnnnggagccagtgtttatccctagagcacaaatgggcgttggcagcccattccctatggagggatactattgcagcccagatacaggaaggagggtctaggccctcccctgaatcatatgacagacttgaaggtcccctgtggaggacctcactatctctggggaggaggtggggggtgggttgggtgttggtggggaacattggatgggagggcgagggaatggggggatggatatgtaaatatgagtgcctctaaaataacaataataatatttaaaaaaaaaaaagagttgctgaggcatgtcatctcttcgcagcaatagaaactctgagatacctgatttcatgcaatttcagcttccagcttaattcacgtccgatctcatgtgtagctggcttcattcacattctactaccctgcatgcctggcttcatacatgcttggcttcatgcatgccttgatacatgcatacctggcttcatgcatttttcagcttccagcttaattcatgcccagcttcatgcatagtatctgtcaggtctggctatatgcatgcctggcttcatgcatgtttagcatcatgcaagcccaagtaatgtttgtctggttgcatgaacacaaggtctggctctcgcctgtatgaacagtctgtttttgcctctctcaatgtcattatgtcatcaatatcacttaggactcggagaagctcctgaaactgcccaaaaggcttctcacagccttgtgataatcctggtaatgacataatgccaccaaggcctttgcaaagagcaggatgcgctaagaacttattgtgtgttacctcaccggctcttcccagggcccctgggaaaatgtatttattgtaaggcaaccagggttacagtgcctttcccagtatatgtaaggcagtcagggaaagacagagtttggatctgaaccccagtctgactgattcctttgacatcccttccagatcccactgcagtggctcttgggtcaccccaggaccaaccgtggtgccacataagacttgtttcaaacgtcttgtctcccaagtgccgagtctgagaccctggggagcggggctcagccatctgtatggaaagctgcgcagaaggccacctgggttgttttgttactagaatgtggaaacttcctgaagagagaggaagggaccctgtgccctgggtttcctcttctggaaaatgccaggtggtttcatgtctaccctggaaaagctctgctttgaaggacaaaaaaagaagctgaggtgaacaaaggcctcagcagtcaacctgagcagacaggcaggaattccaggaagcctcccagagtggagccttcatgtaataagcaatacttcataatcagccacttaagcaaactcaggaaaacaaaaggtgcacagtctctgaattcctaagtggaaagattgcgtgggtgcaggagtagctgggtcaggcagccaccactagctctctttagttttaagaaaattagctccatgttagcgtgacagctgacaacttctgagagtgtgaccttgctctctctctctccagcttatctcagtcagaggcaccagggaactccgaagattcatgcccatccacctggaaggtctttaacatcctcctgcaccagtgcagtccctgaatttacccttcgcttcaaggactcctcgggagctgaccacagctggtgagagctgcactttcctcatgtcagtggcaacagcaacggtaatggtgtgagctaagtgtggaagacctagctgtgatttagcccagaaaggaaggacgaagtgacttcttgctggtcacacaaagatgatgtaaaacgggaagggactaactacgcctgtacttgaacctagtgaagatcactctaccacaccaaaagcaaaacgaacacatttcctctggaaacgcttgactaactaggaagaacacatgatccaccttttcgtccagggttgttcttggctgcccgggtttacggtgggagcgctagcgtatggatttcatctcccctcctccagaaagagtgcaagggaggccaccaactaccagatacggtagcaatcgtacttgtaagattctgggaatccccagcctctaacaagtttaggcctgcataagctactagggctgcagggggcaggacggcctaagggactgcgcaggtcaccttaatttgtaccaggtctaaggagctgtggatattctgcctttcctagaaaaatccttattcaaatttcacatcttgtcgctcttaaaactcaaatgagagagcctggtatggtggctcacacctgtattcccaatacttatggggctgaggcaggatgatagctgtgagtttgaggcttgcctggagttactccaggcccacctgcactatggaatgaagccttgtttgaaaaaatatatatataaagcccctggtgctaataatgatttgttatgcaaaagagacagcacaaaagagtaaacagcatcccttccttgttacttacacattttcccagagaaaacactcaaggcagacgtatctataaaatgatacctattgccacatgccacctcccaatttaaaaaaaaaaaggaaacagactcaaagtaaaggcagaatgtgatctggggaacattcatgaaaagtccagatgaccaaattatcagagccagggaagactgtaacagggatcatgagaagtctgctcacggtcctccctggaccacttgaggcctcctccatctgtggctttaattgccttctcggcaaaaggttaactagaaaatggcctctgccaaatgtctcctccaacattgtagcaaggctcctacaattccctttagtaacagacaaatgctgtcatttataaatgtaaactgtcacctgtcacggcccacgccaagttaggtgttctgtttacagtaacaacgtcgctcacgatctcctggagctcattcacaacttcatggataaaacagactagatcgaaatgtagttggtttaactgcaaatttttcatctagacatttactgcttaatcaaaatcagtaccaatcaataccgatgatcttaccccacgaagagcgtttaacttacccttgccatatccaccaagaagttttcaaataacttccaaatgtggttacttgtatagatttctttcatctccacttccgtgtcaacataacagtgattgacgaagttcacgtatgcaatcttcacctgtgtgagtttcaaacgcaaaagcaagttcaatttttcacccaccgccttccattctacaacatgaaatgccgtcttgcgggctcctgtagcagatcacggtttgttttggacatgtgcaggctccctgctctcttccctttaacagctattccaccctggtccagggaagcctgtggtccatcattccattcccccacacccagagactgctgtgaaaacaagagcttaactcagagcaaacctagcgtccttgagacactaggaagagctcaagtgtctccgagagaaggctgtacatagaaacaaatcatgtcagtcattccatgggattccgggactctgagacagagccatgaggaagaaggacgagctttcctgcctaccgggcttcctgcggctccactggcgtctagaaaacaatcctcaatggcgtgtgccgtgttgagactggccatgggctaggatgagctgagacaccatcatctccaaagcagctgtacttactcattgtccaccaggcatgaagcccttgggccatccccatgtctcctctaattgaacaaaatctctctcaatcctattaagcagatgcagtgactgttttactttaaaactgtggatgctggaagtgttggtgactgcgggagtcaacaacacagttaaagaacattggataaaaaccctgactcactgttgaagttgctggagacacatttgctggcatctgctctgactgaggtacccaaatgataattgtgaaccatacatggccattaccctcctagagccgaccctcttggaggaaggcatgaggtttaatgaaagtcaactggccagttctccattggagatgtgggtggccgtatctgcatagccagaggactcttctctgaagaagtaaagcatgaaatgaacacaggaaaggcgggaccccaagcaggaactgaacacggggtctggcatggaaagaccaggacctcggataaagactgagcccacggtcctctcctccactccacccttctctgctgtgccatctcagccccaccaaagcaggaaggaccctgggactgagatgctaacggttccacataaatactccttcaggttcttgactgtgttgtcatggctcaaggtgaccggaatagggactgagacctcccctgaccccttttgattttatgtcctttagtgtatagcacatatttatgaacttgtcgtgacataccataacagcggaaaagaaagaaatcattacactgtgtgttcctggaagcctcactgacaatccgggtttcctcagccgataatcactctctgccaggtatttttccccagttgtcaaagctgaggtagaagagaggctgagagagggtgtggcatgctctcgagaagactcatactctgtgcagccaggtaaagccatggatctatggtgggtccctgcagcaccggcctaggctctctcaccaatgactgactcaccaatgagctaccgggttcacactcaaaactacaagtgaacctttccctgaaaacccactaccttacgagacatttgtagttgttagtcaaggggcctgtcttccttctgtgcaaacaaagctcaaagtctttgtgctcttttccactttgaaaattacatgaccaataatccctctactaaatatgtggtgtcatcataactattaccatgggagacgcccaacacccaggtgagctttaaagacaggagcattctacacgtgataagcgtttgtcgggctgacctcagggatacagtcgtcatgggtcaccaccctcacgatgtcgtccagaggcaagagagaattgcacttgatttcggtgtagacgttcttcccctccgtacaggctgccagcaactccacaagggtgatgtggtaggctagggggccgctctcatccccgcgggctctctctgagcacatcatgttgaggaggatgggaaatgatgctctgtcgttgtaaaatatcagcacatcttcacccccgttgatcaactgaagtgaagaaaagaggccgcatagcagatttcgacatttctaagagtttcgacctacctgacgacacacagatctgtttacaaacagaaacaagcacgcggacacacacacacacacacacacacacacacactgcaaaagcagagcttcctcgggtaggaggagagaaaggtcaaatgccaagtgactggtgactgatgctgccaaaactgggccggggatatgagaccagcagatgggataagaaccaaacagcactgagccagtcctgggggtgcagacctgtaaccccagcactagggaagcgaacgtctgagttcctgagtctgttttctataaagtagtaaagtgaaggactggaaagacagagaagcccctgctcctgcagaggaccagaggatctgacgccctcttctggcctcttcaggcagtgcactcacgtgcacaaacccacagactgacacacttctatacacattaaaaatgaaatgaatcatagaaaagcattcgcattagtaagtaagcaaacttacacattgcttcaagtacttacaactgtatgaatacctggaaatgtcctcattttatgggagggcatcggagagtagaacagctgagatgacaagcggggtacacttggacatgaatgttgagtggtacacttgggacatgaatgaatgctcctcatattttgttgtatgcttttagcgctcaagatggcagcaaattttatttaccatgctattatctattactgacaccaattttctaagcctgataggaaatatttggtcaggttatggatgatatgtaaatttcaatttagttactatatttaaattggtaacatttaaatcaatgagccaattaactgattggctgactttgacagtcctgttgcaaaggaatttatgtatccaaatatgcttatgcataatattacaacgatttccttatacacagaagcatttcctttgataggtgccaaaggaagggcctacgtatttgcttcacagtgcgcttttcattgtttatttacaggtcatttgtaaaagtttatcgtcttaggctgcattgcattttaagatttctgggtgacatatgaaatcaacacagagacatcagacatctctcacttctaactgaaaggcatgtggcgatggaaatttccccagaccaacgcgatccccccgggtaacagcttccttgcagctgtgggtggagctgctctgatgcacaggccaccagcctgcatctagtcaccagttctccaaagggccacctttgtgtccctagtgagcagctaacccacatcaacctttccaaagcagttagctcactttcctaagttcttacctcattcaaaatacccagttcctactgctctaatagagccctgtcaatcacttattaactcatgcgctgttcctcaaaactattacaaacagtggcagagagtacctgtcctatcattcagaaagaggaatttttaaatagaaaaatggtgttaattccaaataaccttgtgatctcctaagatttcacccattgtaggagctggagaggtggctcaatggttaagagcacttgtggctcttgcagaaaacccaggctcaagtcccagcacccatatcaagcaggttataaataggtgttgctccatctccaggggatctaactccctctactggtctccacaggcacatacatacacatggtgcacaaacagacatgcacacaggcacacagagacatgaacacatgcttacatgcacacagagacatgcacacagagacatgcagacacgcttacatgcacgcatgcatacatgcacacatgcttacatgcacacattagtgacatgcacacatgcacacagagacatgcacacatgcttacatgattacattcacacagaggcatgcacacagagacatgcacacatgcttacatgcacacagaggcatgcacacaagacatgcacacatcctcacatgcacacattagagacatgcacaacacacacatgcttacatgcacacagaggcatgcacacatgcttacatgcacatagaggcatgcacacaaaggcatgcacacatgctcacatgcacacattagagacatgcacacatacacacatacagacacatatgcatacacacacaatttttaacagagtaataaagtgtataaaaatcaggaaccatgaatttgttgcctccaagaaatacacctcttgataaaacacaactactaaactcgggtgaagaatggaaaatacttctctagcaaatcaacctaggagacaaacacgtgctgatgttcccacatccgacaaaacagacttatgataaaattaatgggaaagaataaagaaggtcattttatactcattaagtgagcaatcaattatcattatgttataattataaacacatattctctgaatatatgtgcatctaattgtatgaaacaaactcaattatcccaacacaagaatattgtgtgagatcaacacttcaccctcactaactgataggtcatttaaacaaaaataaaaagagtaatttaacagctgaattcaatgataccattgatcaaagggacttaacagatatccgatgaaacttaatagatattgtatgacatactattaaatgatgaatttgtcattgatgcaactaataaaataattcccagaaacaaaagaaaataaaagataatatctcaaaatatatgggatacaagaaaacttaaataggaaattaatagctatgattgcctacatgtgtaggcatacacacacacacacacacacacacacacacacacacacacacacgcacacacaatttttcaattttaaaaatgacccattatgtaacggatccaattccgttacagatcaaaaagaaaaactcttaataagaccgtgaggtcagatggccctgagtcactgcactgcaccagtgtaaacctgtgggtgcctcagcagtcacagtaaacccagatggctccggaggtctttcccgctacaagctggcgacgcgggtccaggcacaaacctacctcggtcattaccatgtcctggcatttcttcacgtatttgccatctgctttcacgatcgtctgcaggaaccgcaggtactccacgtggcggccgtgcgtctcaatacagtgcacaaagtgctggacgaccctctcgctgatctcgttgcacaggtgatagttgttcatgaagatgtgtcgcatggtttctgcttccaggagctgagcagagagggcgcacctgcgtgactgggcggggccagggttctacaccacagggcctatgttccctgactgccatgggcctggtgtcctaagtgaagccaccatgagtggccagtgcctgtcctgggtgagacaccatgagtcatgaaccactgaaggacagacagacatctgcctcacaatgggactcagctggagagaggaaattagcaagtgcactgtcagcgacttgggggcagcttattcgttattccaacttggctctaaagatctgctagttttttatccttttgtgagagtatggtataagcatgtgtgttgtgtgcacacgtatatgtgctcacaggtacacgtgctgtacatgtatggacatgcacatgcagagaccacagcaggatcggcgcactcctctgtcactgtccttcttattcccttgaggcagagtctctcactgaacctgagacctatcccaattacactgaccggccagcaggctcctccagttctcctgtctctgccgtccacaccgatattacgggcacacgaggccgtgtctggcttctatgtgggcactggggatctgaacccaggtcctcacgtttccacagaaatgctcttcttcagccccaagatctgcccccaggctttcagccagtcatagtcaacgcaaccttggaatattcagcatctagctcctgtgagtttgttttcggttcgggttttgtggtgctaggtcctgaacacgccagacaaactgtcgattactgagctacaaccccagcttccatatttagcttcatcatggtatcatgaaaaaagcactaagctttctaaaatccttattctaacattgaatcgcatgtcgtaaatgaaaccaccgtttgcagatgaaatttgtctaaattttctaattaagagtttcttctacggaaacactcaagtttatggagtgaatctccagggaagaacgatgtgcaaaggtcaacaaagtttttcacagagcagtaaatgctgtacgcgctctgccgtaagtgttaggggccgccacggtacttactccaggagtcaggaacaggttgagatgtttgtgaaggagaacttgattctgtgggttcccccggcagaagttctgcaggaaggcgtgggctaattccatcacctcgttcatcttctcatcgttctgcaggcgaaagggcagcacgtgacaccgagaacggaggacaggcttacacaaaaccacctccctccaccaagcatgccgcctccgtggctctgtcccttcctttctagaccgttctctccttctctattcttcctgcctgtctgctccattcctcccaccctctccatctttcctccagactttccaattacccacccatgcccatgctaacaaaaaatgtgaattaaaggctggatgaaggacggggtattctcaatggaacctcaggaaagaatagttagttattacaaagggagagggaggtccttacagtggacaaaccagcagacgcatccatcactcatgtgggaacaaatcagagcctcatgtgcctgctaggaagctcgacacagaaactagaatccttccatgttcccactgaagatacctgagcaaaggaggaagtgagggacgctctccagaataactgtcagtctacaagagagatcaggactgagagagagcagacagaacaaccaagcccagagttagcgtgctcctaaagcagatgcttttctcaaccggacatggctggaactatggaagaaacctgcgcgctgtgttggattaggtgatggtgtatcgtgcttcttcctaatttacaaggtggaagcaggtttcacaaaagcacacccttgtgtgtgggaaacacaggaaagaatccaaggacactgggcaatgggtaggggttgtcctcttaaacaattaaggagagaaaaattctttaaacttggtgatacattttcagtaacacagatctgaaggaaggcgggacagggcaaaccttttcgtaggggatctgcagaaggtccagcaccaccgcgtgagcccccatgttcttcagcaatcgctggtgttggttgcgacacttcttgttctgcacgcagagcttactcagcctgatcaagatctttaacgagatgaagtgctgcattagacacagccatgtaacatgcacctgaacaaaaacaacccctgtgtgcacacgcagagagaccgcacccaggctgctgacctccttgacgatccggtagttgttgcctttgttgctgtcaatttgcggcgtcttcacgccatcctgcaccggactcaagaggttggattcctgaagagaacatatgtgttatatgtttgtaataacttaccactcttacaataaaaataaaatttgtagtgattttattttattttattttttggcgaaccaatgagtttattagggttccttacagaagcatggctgacataaaggcaactagacttctagaaagtccaaccctcagcgtggcttagtgatggccaagtggttttatttaaaattgttgtttgagcttttattggtgcatcaaaattttctcagcttgagggaaacatgcacactaccataacctcataaaaaccaagttacacgataaatagatgagtagcattgctgagcattaattagtgaaaattaaaaataaagggctgttggacatattgctagtttacaaatctatgtgtgctgcagacataccatgggtttatattttcaggaggggaaacagttaaaatcaagggcacaccagtcataattctatcaccaaagacaagatgtaaggaaatgatgaacaaaggagcaagcacatcacggcattgagatacatgtcagggaataaaaggccaacttaaccccaggatgctgtgcccggttaccatgacatccgtaagagtcaaacttggagcagatcaagtgtgtgcaggaaaatgaagaaagaaaaaatagaaattaaattaaaaaataatatttcaaattactgcactcgtaagacttatggacaattctgagacaccgaaaataagtaatttcaataaccactatctgctacatcacattcagaaagaaatccaggacacgtacacactttaaatatcagctattggaattgccatataaaaagtacctattagcaatgttttcccataaaacgtttgtaagtctcactatgtgcctacactagcctactgtgagctcctctgagagaaataaaagatcctgcagccacctcaggaaccctgaaatgagaaatcagaggtgtgaaccgagtaagacttgcaatccaaggagaggaaaagagcagcctcagcctcaggcagcgtgactagaggagcccaagtttaagctgaggtcttcaagatgaacactagctagctgagtatgaggggtgcctcataggcggtggggcagagtttccagagaaatcaaaggtaccacggggagagcatctggaatatgcacggaaagtggtaagaactgtttacagcctgcacagaaccgcacctgggatcaatgtcaagttcaagttgcatcaaaaacactctaacctcctgcatgttggtagtgtggggctcccttgtttagtgggggctgccatctaagctcaggaaaaagcaacagaggtgcatgaggaaaattgacattgtgttttgtttgtcccaagctcaggagcaattaaaaaattaactcaacctgaggagttaaagcaaatgctttccctgttagtcaaaggaagccggcgaagggctctgagccacagaaaggtgcggtccatctgaagctggcacctctcatcagcttggcgtttcttcttcaggtaattcctggtaaatactgtccctgctctcctggtctgaaactcgcctgccattgccaagcatgaaaacccctgtaaacaccaccccagtatcatcactacccagaaggctctcttgtgtctgtgcctccgagaactggcctttggagtcatgggtttcgggaacaccatctccccaaatcctctccctacttcatgccccctttgtttccgagacatgagcaggctcaaccctctgcgacctctcaccgtataaaaaagtgtgggcaggttgaggtcattgagagttactgcttgccccagcagacttgagtcacagacacttctcccactggagaggcaactgtgccccacatttaacctccctctccctctccagcatccgtctccgactcagaacaactggggtcaccaatgatgggagagacggacactggaagcctttagggtttagaaaggcggatgggagctggtctgtcagctgtcaccatggctcgagggggagctgagggcagcacagcctccaccccaggtacagaagggggacaagtgagacactgtcggccagacaagagtctaagaagagactagtgctaaccctgccttgttggggaggttggtgcagcccacaggtaaccagctccgtaggatactcagctagactccagccggagaatttccagttcctatcaaaaaggattcaccggtgagaagcaaaggtttcaaattctagaattgtaaccaaatgtttttttttgtttgtttgttttttctaaactgggcctcctataatctcagcgcactagaaacaggggaatctgagtgcaaaatcacgagattgaggcaagcctgggctacttggtaccctatctcaaaaaacaaaaacaaaacaaaacactagactccctcttcgaatcacagaagtggggcccgtattttcataaggccatttcaccaggaagaacagctctgatgaaccaatatcaagatcttaacctgagagcaagtctcaaggctagcagagctcctcacgcggagtctgccaacattaaagaaaacagcaaaaacaagcagcaaagcctggcagacaacgacctcaggagaaagccatcttgcttttaaaatagcagccttgggctggggatacagcccattggcagagcccttgcctggaatgtacatggtcctgggtttgaatcctagcaccattaaaaggaaagtaacactggccacggcattacgataattatgctctttggttcaacccaagggaagagacaaaaaaatgctcagctctctgaagaaattatgaagaataattactttaatttaaagatgccaggagtcaacaaaaggcgggaacactggagaattcaataaacaatcctttttaatttctgaaaataagtcagtgtaagcaagctgaacaaaaacatcaacccacagaatatctggataattccaaggcagggataaagattcagaaatatgcaaacttatgcagtgtgtaagggcagtttgtattattattattattattattattattattattaacaggctttaaaaagatgtttcaaggttttacatccctaggatcagaaattgatggtgttcattatatcctacacaacattaaacccaggtcagtgatcaaatccacaaagccctgaacttattctaatgacaaaatactggaaaactacagtgtaggagaattagttacgtaaaaccccagagctgagtaggcctgggcaggttggggggcggcgccatgcttacagcacaaatccaaatgacattttgacaactgtcacaaaggactaatatggtaccgtcaactacacgacctaaacttatttcttctaggtgagcattcaaagctagctgatctcacagggatatatgcaatcacacactacatattcagactataagccaggagctcagaaacagagcaggaacagtcttcccggaagagagagtgctgctcaaaacagttcatcacagttctttttctcttttccttaaaaaagagtgtgtgtgtgtgtgcgcgtgcgtgcgtgcgtgcgtgcgtgcgtgcgtgcgtgcgtgcgtgcgtgcgtgcgtgatttattttttttatttttatttttttgcttctggcttttaaaaacagaactttccagatcctaacacgtagagccatgaggcacccacagctgagaactaagaccatctattggaaaccttctcctcgttccatcccaccactttcaggagctgaccctccacagattggcccagcaggcgacgcctcctgctcaccgccgtgtccaaagcctcctcttgaaggagccacacaatgaggaacaccactgaccagccagtcttatccctaattctgacggcaaatgtccatttcccgccccacactcctacaggccatatgggggaacagtaatggcccatctttcaggttttgtcagtcaatccaatttcagtttagttgacactcagaatgaatgtcccctcaccaccacccctgcacacacatttcagataagtgaaagataactcctgtgggccatgagacactttgtctccatcgttaagggcaatgccagctacctaggcccatgtctggcagattacagaatgagtaaaatctgcagataaatacacctggccttgcaagtaacatcactgtggcccattgtggaatcttgaggaattcctgcttccctcaaagatgtgtaaggctacttgagggcttggtccaggatccacaatagactcatgaggctgtgtgccgcacagcgggcagatagcttgcttctgggttctaaacccagatccaaattccttccccacatttccttgtctctccatccctctgacgaagtaacaaaaggtgtgccctggacaccttccttttccttgggcttcaggaaatacaaggaatatgtttgattgatagtcttctgtttgttttacacaggatttcgtgtatcccaggttggcccaaacctcctaattagacaaagatgaccgtgaactgatctccttgactcacctcaagtggtgggagtgccccacagccagtttaagcagctgcacactgcaccaggtcaccgcatttcctgtatcagactaaagagccaccctgtttccaggaaacggcagctggattcgtcaaccttctagaccagtggttctcaaccttcctaaagctgcgaccctttaatacagttcttcgtgtgatggtgacaccaaaccataaaatattttgttgccacttattaactacagttttgctactgttgtgaattgtagtgtaaatatctgtgtttttccagtggttttaggcgacccctgtgaaagggtcatttggccccaaaggggttgcagcccacaggctgagaatcactgctctagattccttggaatcttgggaaaatcaacataagagggaccttaaatacctggtaaacaagcagagaagtcggatttactgtctgttcctcccttactgacaagtcctgtttgtgtctctctttgtttgagcccagacctttgtctctagccctgcaaactcaagctgaaaattctgtccttacacggttctgagatttcgcccaagacaaaacacacaagacaactgctgggtttgtagactcttattgcttctgggcttccacgctggatgaaagccatcaactagaacatacatcaatcacctgcaggaagtttgtcataaaccttttgccataagggacatttatcaataccctgttaactcaaattaaaaaccgtatacacatgcaagcatgtgcgagagcacacacacacacacacacacacacacacacacacacacacacacacacatttctaagagggcaaatacatctccacagaaaacaaatgataagaagtaataatatgaagtcgtgtggctttggctttcttcaaggctgttctagggcctcctgtgtcattattaaagctgaatgctgtgtagacatccctcatgtgatgttttgaacgaaaatggcccccaaagggattggcactagtaggaggtgtggccttgttggaggaagtatgtcactgttggggcagactttaaggcctcttttgctcaaacttccctcagtgtgtctgtcagtcgacctcctgttgtctacaaaatgtagcactctcagctccagcaccatctctgcctgcacgccaccgtgttctccgtcatgatgataaaatggactgaacctctgaaactgtaagcgagcctccccagttaaatgttttctttataagagttgctgtggtcatgctgtctcttcatagaaataaacacctaactaagacatccagtaatttcactaatgtttcatctgctcatgtgaactacaaaatcaccttcaaagctcatgaggcaacagcacagacaactgaggggctgggtctctgagctcaagatagggagggtcgtaaccttaggagggatcctctcagtctctggagcttgtgtgctcaactgtcttaagattatcttctcccatttatagtcagttcaccctcagacagttcttcatagtctacacctcctacgtggttcccggatgggctccagaggttgacagttggcagggtagagattccaaattcatctaaacccaaactctggccaaagcagccagatcagctcagtgtcaactaaatggtcttagggtttcaaatcaatcagcagcttgtaaaaccatccagcggacacctcagataggcctaagtcgtgtctccagcctggggaggagctatgacatcatcaattacccagaaggtcattattagatagttatccaatgctagctccgagatctctgtactttacaagattagagcataaaagagggctttctaataaagaataatgacacatctgctcaaaaagttaaacaaaacaggcctcctgaaacaagacagtcccccaaggaaacctttctgttctagaaattttagaaacagcacaaagcccaccataatgcagatcaacacattggagcctgactccagtccgcttgtgcctcaaaagcacactgtactataccgtcagacctgcctctctcctacactgtaaaacatccacacgttaaagccttcacagagctgaaggataacactctgcggtggtcaggatgagcccaaagcatccctgactcacataagggtggctctgggaggaagagggactgtaagccaagcatgagcaagagaaggtgagcccttcctctagaggcaacacagatgtgctccgtgggtctggtttccaaggaactgctctccccatccccactggaactttttaaaggacacattgacaatggagtgcctccatgaaaatgcccagaccgcaccataaagatgtcaacagctgtccctgaagaagcttggaaaagagagggacagacacccaaacaatgccagcccctcttctagacaaccagactttcgcccttgaggatactgtccagttcattccattccctgaaccacacgcccaccaaaagaacaaaagattcagagcaaaggaacagacagagatgtacactgggtgagtattaaaaagacctaactaggaaacctgaaaaaaggaaatatttcccctagtcacaaaacaaaatgggtgcttaatatcagccctaaagtcattgagtgagtgagtaattctcttaccaaaaaactggaagccaggcacaacagcatgcctgtaatcccagcactgaggaggcagagacagcacacacacacacacacacacacacacacacacacacacannnnnnnnnnnnnnnnnnnnnnnnnnnnnnnnnnnnnntacacacacatacacactcatacacacactcacacacattctcatatacagactcacacacatatacacactcacacacatacacacacactctcatatacacactcacacacatatacacattcatacacatacacacactcacacacacactcacacacatacacacacatatacacacacttatacatattctcatatacagactcacacacacatacacacactcatacacatactcacacacacacacaatgttttaaagtaaaaggaaatgctggaaactacacaggagcatagaaagaaatagttaaaaaacagagaaacaaagtcatggtgggaataattaacaaggaaacaacccttatgggttttctctctggaacacggagacgcccaggtgacctgctacacagactaaataaagaagtgagagcaggaagggcaatcctgacttaacccacagagacactttcctgacttaatctcccttctaaatttagaaaacacatatttgaaggtgatgagttagtggtttgttgatgctgctacaggctgtcccccagcctgtaagcctttggatgccagcagagcccacgccccagaagacacatttgggagaggataagggcaatgctggggtactcgggaacatggctgacagacactaggtgtgggacctgtccccttctctgtgatcgttagagatcagttccagcaatggggtaatttgaagttcccaaggacacaaagataaggtatttcacagtttgcctacagagatgcttaccaattcttgtttgtttaaattctgttgaaatctctcactgaatggcagatgaagggccatttgtaattaagttcactttcatcactgctaagctttactttgatgagaggctgcactagcattttatcaggttgaaaaaaataacataagcatctttttagatttaatatattcaacataaatcacagagaaaaacatatatttgccaatattcgttttttttttaaatgaaatgttttcccccagcccttaaagaacctgtgctatcagattatgataagaaatctaaaccgtgggcttaaaagtaggagtgtaaatatttttaatagtatcacttataaaataaacaaataaaaaattgaaactttcggctattgaagacttttttattacataaacaaaccctagcagtcactctattgcctctaacacttaggcagctgagagcccgatggctctgatttgttcagaataccaaaggccttgtttacagcctctgtgacactcagagacacaaaggactgttatgcccaccgcctgctggagtgcatgctgactgctactggctattaccgcctgctagagtgcacgctgcctgctatgggctattcccactgacaccaggatggatttcatccgtatgttaccagcatccttggacgctggttcactcacaatgtagattattaatctgtgtaggaggttttttgttttgttttgttttgtttttgttttccaagacagggtttctctgtagctttggaggctgtcctggaactccctcttgtagaccaggctggtctcgaactcacacagatccgcctgcctctgcctactgaatgctgggattaaaggtgtgtgccgccaccatccggcctcatctgtgtaagagttagcactgtcgcttctcacatgctttctttcttctcctgaaattacttcattttacatgggtgcttcaggcttctgcgtccacccatttgcctatgtttccatcacctcttccccctgtgcattcatatactcacacctggtcatgtgcaaaaggctcctagtgcctctcgcattagtcctagtccttctggggtgtctggattcttctgaagccttctggaatctgctttctccttccttggaactctcccaattcccagccatttctaacatgaatcacttagtcctgttgtcattattcttgaatacaaagcaagcctgtgctatgtgtgtggactttctcacactgttttataggtgtccgtttctgcagagcaagggccatatctggagtatcagatggattccagacctcatattttaggaacggaaatgagaaattcctctgtgtgccagctaagggggttacatgtggataaagggacccatagcacactgggcagagagtctgagaggaagactctactccagggaaacacaaacactctactcaagggcaggggtggggctcagctgtggtccacatggcccatagccaacaccagaacctacagatgaaaacacagaagagctgaccattgctcacaactgtcagacagaatgtgagcagccccttccagacagcatccagataaaatacttaagatgcctctttttggtaggaagatagaaaccatgaaagtttataaaaatttaggagcggtaagaagtcctggagtcactgatgcccctcggggctgacgcccatgctggcaactgtcctagagtctaagtgttaatatggagggcaggacagggaggggggaggaggctggggcaagcctggctgccaagaaagatgaaaattctggccagaagccacagaaccacaaacatcaaagggaaccaccgcagtagtgagtcagcgaaacagccacagaaggacaaggggcacccacgcagcgtggcttttgctctggccacagtctcaggggtgcccccttaggctcctgtacagaaagaaaaacccactccaagatctgggactagaattcccattcataaagagacccccaaagtccgtatttaatgaggttacaaaacagaacttctgtagattacattcaggcctcagaggaattgcacttagaatgcacctttgtaataacaatagaacaaccctactaaaggccccaacttctgcgagaacatgccttcctacaaagaagctaggttctggatataaacgtaatttacaacatttccagtctctgggacaactcctgccccttccatcacctaagcaagagccattgccagagggctccaatctacaggctgtgaacggaccatccagaaggcaaaggccactgttagctctgcagcccaggacccaggctctgagaaagtgtcaactttctgggctctaaacccaagatgcctgacttgagacaggttagcagctgaggatgtctgtgggctcagactggcagcgccccctggcaacagtctggagaactacaattgcccgaggaaggaaagaactttcttctttctacttcaaatctacttctgtctactggatataaaaacacgcaagctcagaatctgcaagcaaggagctgtaatatctcacaaccaaaaaggcatccttagctggacatgtactcagaaacagtagaacacccacacgcgaagtatcacagagacaagcgtagtctgtctacatgggatgtgagaaaacgttacaaacacattaagtcaaagaagcctgttgtcatgtgacccaaccacactgcattctgcaaaacgtgaaacctcagagtctccggggcctccgagacgcgaggtggatgggtgaagtgcggggctgtccgggccgtggatctactctacgggtgctgttgtgggtgacagtattcattttctcagaactgtgtgtaggatgtgctgcagagacagtgagccctcaataaagcaaggcgggaagtgtacgagcgccccctgctagtcacgtgcaatttctctctaaaccaaaactgttctgaaaatgtgtctgtaaaggaaacgtaagaattcataatcagaaatgagcagaaatataatgaaataagtattcttagaaatttccaagtagggttggagagacggctcagcggttaagagctcttgtcacacttgcagaggacccaggttcagttcccagcacccacatggcagctcacaacgccctgtaacacaggtccaggggatctgatgccttcctctggtgccatagatgccaggcacgcatgtggtacatagacacacatgtaggcaaaagataactgtgcataaaaacaaatcttaaaaagtaaaatttttaaaaattagaaaagcacctcccaattacttcacagtatacagaatatcaagtaacaagaatcggaaaatgtaaaaagcaataacatctgatggaaaccaccaaacaaatgtgaaaaaggttaattttcagttatgaaaacgtacaatggctgaagttaaattttcatttggtatggtaaactttaaataagttgtgggtgaaaacacatatgcatgaattccaataaatgattcagtgtttactgcaagataacagacttgagaaagatgaaactaaaattaacagatacatatttatattgacatgttaccaacaggcacactaacaaggtttaacatatacttaactggagtttcaaaattaagatccaactgtttcaacacgcagcaaacctcttcacggccgccatgggggcagaggacaaggagttacacgagggggccggggtgttgtctggaatcatctccattgctctctgtctgaccttttcactgaggcagggtttgtcagtccaaaccacagcttgtctatgtgtccagcctggctagccagcttgctctagagactcgacatttctgtcttttgatgccggaattatgggccacctgccatgccctgcagcttttacataggttatagacatccaaacacctgcctctcacatttgggcagcaagtgcgctaaccacttagccacctccccagtccagcatcattgtcaggtacacatgaacaaacaggaactcgttacctgcctcaacagaactcagctttatctaaactggaagaaataagacgatgaatctaaaacaaacctctaagtccactggtggaatccaaagaccaacatagcgccgcttctgatagcgcatttccttcagacatcagcactgcaaagagcccagaagtccgccaccagctgattaaaaagccatgtgtgacaaggcaccaatgcagactatcgcatacagatgaactgttgctgcactcaacaaggattggagacagcagatccaaaacagcccgagctatctcccatgcatttcttgtgtttcagaaatgcaaccacataggagaagaccattaaacaaggaagctaaaaaactcgtgggagtagtctaaggcacaggggcttattaccagtagtgttctgtctcttaagatacgcaccgttccaagtctggctcttactggtgtgattaaacactgaccacatttaacttaaagggcaaaggatttattcagcatacactccaggtcatccctgagggaacttgaaacagaaaccatgaaagaacgccccttgttggctccctccacaggtatatgcttagctggcttcctaatataacccaggaccacctgccctgcccagaaatggtgttacccacagtgcactgtgctcttctacgtcaatgaataggcaagacaatttcccacaaacatgtccacaggtcagtctgatggaggcaatccctcagttaaggttccttcttcctggatgactctagcttgtgtcgagttgacaataaacactaattggcacagatgtcttagcccacaggtttaatggtaaaatgtgtccaggattcagagaaggtactagaaggactcctgggacaggctctctcgtccctaaacaggagactcagaaagaccctttcattctaggtggtggtcacggatttgacaccagaatgctgctgctaggatatggtcaggggcagcctcagaattaagcccactggtccatgatgacaagcctgaagcaataaattaaggttgcacaggcttgaaagatggctcgatggttaagaaaatttgctgctcttgcagaggacccaagttcagttcccagggtccacattgggcagttcatagttcataacagcctgtaactccagttctaagaggcctgtaaaagcacttatatatccatgacatacacacagaaagaaagaaagaaagaaagaaagaaagaaagaaagaaaggaaggaaggaaggaaggaaggaaggaaggaaggaaggaaggaaggaaggaagggtcttactgcttgctttttctggtatctaatgtcaacttactattcatattgtcagttgttcaagaccaatgaggcaatgttaactgactgtccactgaggccatgctaatgattgattgtccactgaagtcatgctaactggtggtgttttttcaggtgagggtcccaattcccagatgacccacgattgtattcaagtgacaggaaaaaacccctaaccagcacacacacacacacacacacacacacacacacacacacacacacacacacaccatcatcatcatcatcatcaccaaggactggctcactgactccttacagtatactgcactgtccatgttgtagatgataaaaataaatcttggaaaatgtaagcaagttactctgagttgcacatatgctgagcagtagatcttggggtatctggttccaaccctctcacacccctactgatcgtctctgtattatcatctgtgctctgggtattaaatcaggctgtcttcactggaagacaaatgtcacacaatttcaattttatgtgtaacctagaaatgatgaacttatgggaacagagagcagaattgtgcctattaggcttcaatgtgggtcttttaacaatggggaaaggattggtttaaggatataaaactgcagtttgacaagaaaaaataaaaaaatcaggttgtcttccttcacttagctctgcctgcagccagtctctccagctcccctgcagtgaccattctaaatccaattcagcccaagccagtgagatgagctcacttgcaacctagaggccaggaggaaactacaaggcatctcccaggaattgtgggagccaaaaggaaaattccagcagacatggaatctcctaagagattcgtattcactgtcactccccatacattcacagagggagtctatggtggcagatgcagccacggacatggccacaaagcagcctttgcctcacaagtggcgtctccattcaacactgtgatcatttgaccttcaagtcaacagtccaatggcagcctccacactccagattttccaaatacttaattcctcatatttaaaccacctcctaatcaacatacctaaagtaatctccacttcccgaatcaataaatctggaactcagcaaataagtgtcagcttcattactcacttgtttgaatcccctagagaaccagttctctacgccacaagctacacagttttaccttgagaatatatacagtccatctatacaccctcttctttcttatgtgcatggaaagtgcctgagaagtgtccaagagaacagcgggctctccatgccacagtaaagggctcaccccacagtccttaatgatagacagcgaaggccaggaagtaacaacatctccccatcacacctcatctgaattctttttttaataatttttgttttttatgtgcattggtgttttgcctgcatgtatgtctgtgtgagggcatcagatcttggagttacagacagttgtgagtggccatgtcggtgctgggaattgaaccctggccctttggaagaacagccagtgctctgaattgctgagccacctctccagcccacctgaagacttctactgaaataactcaaagaggtatgtgtaagtcagatgaaaagcaacagtaaacttcccagaacacatacaaaatatgactttttcaaaacaaaggggttttgtaatttgtgaaagcatagcaactcgctaacattatgtcagaaagtgcaatcttacagaacctggatcttatcatccaaatgttggctgagtcaccgattcaaggcctgagagagccctgggcttctccaagccttagtttattaaacttaaaaaggcagccctacagccatccccaaagttttttgtgacatttaaaaggagattccacacacaaaagtatttgctcttcattgtgcacaagggaagaactaaagaaatgtcaacttattccttacttcagaaatgaattatggaagaatctgtgccccaccctgtagtgatctattattcatgatttattaaagcttgactgagaattcagaaaagcaaagtcagcctcaagctatagagatcaggcagcggtgacacacagctttaatactagtagccagaatctaggaggtggtggcacacacctttaatcctaggactcaggattaagaggtagacagatctctgtgagtacaaggccacccagatctacacaagagtgatccagtcctaaagagaaacagctcacacaaagacgatctcagcacctgggatcacatgcgtttaatcccagcactagggaggtatataaaccaggagcagggtctcagatcaggcattcacattggggataggaagcattgattctccagccacactgaagataggaaggctcagtaccaagagggacaagaagacattgaagtctcaggattctccagccacgctgaggaaaggcagcagtttgaggcttggtgaagagcttgtgcatgaatcagcccttttagcctgagcttgaggtgagagatagtggccggctgctttgcttttctgaccatcagcttgatgtttgaaccccagtatctgtcggtgggtcttttatttatcgtgtcaccaccccatggccctaactgatcataaaacaaatttgtatggactagaaaatctatattccactaacgctaaaatggtaaagtgaagaatgacagataagccaccatcctgagaccagaggtgggatgccaccacttcacctccacctcgtcgtaactcttcggcatttctaatgtttaatgttaatatttaatttatttatttaattaataaaatattaatttaattaataaaattaattaaattatttatttaattaatatttaattggcagcactttctgtgctgccaatctacaacccgaagcaatactcccagacctgtgctgagtgagcctctccacaccactgatgctcctgaggagtataagcttctttccagaaaccaccaattaggacttcggtggtaactggctttcataaaagcattaccagtaacacttttattttaaaaaaaaagtgggggctggacccccccccccccctcaaaaccaaggaaaaagaaaaggttgtccactctatccatatctcttcaatgtacttgaagttctagctagagcaataagacaacacccatacaacggctcataacgctctgtatcccccgttcggggggtatggtgccccctctggcctgtatgggtactacaggcgcggtgcacagacacacatttcaattaagcgctcaatcagaaataagtaattttcttcctgaaagtgaccttggaaacaaacctcatttgtctcttcgcctcctttggcctggccttcgccaatctctccattctcatagctgctgctcttctcaacccacaactcagatttttccaccgtcagcctgagctggtcgagatccgccttgatttgcttgtagttatccacatcctggttcgacaccagcagctgcacctgaggacacgagagtttcacccttagagcgctctcccagccttctgtgtccctggctcctgcacacccgaaatcccatcttcagccactctctagatgaaattcaacacttccgaacacttacgcatacttatgtgtattccgtctgaaaatcttcctgcaagtattcacgaactctaaccaatatgctcacacgcgaaaaggaattcttagatgtgtgctctcaaaaagcttccaaaatgctgacaagtaatttaacataaagttgtgggggttggagaaacggcccagggattaagagcacctcccgcatttacagaggacccaaactcagttcccagaacacacatggtgctcgcaacctcctgcaactccagttcccagagacccgacaccctctgctggccaccatgggtcctgaacacattaggtacatatgcttacatgagtgcaaatacccatataaataaatcaagagtaaacaaatcttcttttacaagataatctaactctaatttcattgttcaagttcatttttctgaggtttctctagacttgtatctgtttgaaaagtcaaagtataaaaacccatggaagaaaatattaatggttacaatacgtttgctagtataaacagcagtttcagagcttgagaccaccatacaatttatagtttatacacactacagggcacatacatgtaaaacatatgcatctaaatggctaccattaactccttcatatctgctagcatcttcaaaactgctaatacaggttcacactccactaaacacaaaacatcagtgagatagccatacttgcaagtaatcactgtgagattaatgtgcaatccaaacatcatggaagacaggccagatcccatcacagaagacagcccagatcccatcacagaagacagcccagatcccatcacagaagacagaccagatcccatcacagaagacaggccagatcccatcacagaagacagcccagatcccatcacagaagacagcccagatcccatcacggggacaggatggaccccatcacagggcacaggatggatcccatcagagaaaacagactagatcccatcacagaagatagactagatcccatcacaggggacaagatggatcccccattacagttcctttctttggatgttctccatttttaatcacaaaatatttattttgaagctatggcttgccaggtacatcattaaattctgtagtcaaaataaccacagcagcaacaaaatttctaataggttattgttccagcagcacttcctaaattctagagactgtcatttttataaagatactgactgaagatcacctgtgggagactcattctgaagcagctcctgtctaggcacacagacaggaccacatctatatttcagaacacaaagtaacaagccaggtattgcagtgcacgcctgcaattccagcactccaggggcagaggcagggggattgccaagagttcaaggtcaatccgagcaatgaactgaattctgagccagcctgtactacagagcaagagagggtccatggaacacagcctcatctgcagctaccatctgacgggctacaaacaccttcagaactccaggaattctcaggtgttccttttccagggccctccatctcgggtgttcgttttcttgggacagagctgagaactgaacccagagcccgagagagctcgtcaagcaggcacccagccccagctcacctgtttaaaggcctgcagcacttctgctctctggctgaagtgcttgaataagagctgcaaggcccccgagagcagcggggggtagtcatgcatgatcaggtggatgaggacccgcaagaacgtcctgcctccttcatcatcaagctgaactggagttttttccttcctgtaaaaccaaaagaaactctaaaataacacatcgcatgatatctatattaaattcactgaagttatacctgtgttttaaaacttaaaccctcattttcccaaaaaagaagagacgcagaggaagacattgttacttcttaatcttacacaattgatgagggaacaataacaaagaaggttcctcagccagtctcaagagttaatcaccagagcacaggaaaaacaagcactgggtgatccctacatcatttttgattcattgttacctagcatataaaataatgggtttcattatgacattttcataacagttcattactagttcaaattttcccactatccctctttgtcctccttgcccttccactcttctagaagagtcgccttctgcgaaagcttttatcaataatgtcgaccaacagcctggagcccaagagaccaccacacggcaagcggtgagggacagtgacaaacacacagccatctccacggggctctgtgtgcttggtggcacagtgagactggggacagggtcccctggggtgaaagatctctctggagcatgtgctgctgctgctgggctgtgctctgggatgtaacccttagatgactgtggttgggcaagcactacagagggcatgacgcaagcctacagagcctatcacacacctgtgtttaatgcatgtatgggttacatgggtgggggaagatggatatgaaagagacgaatggcagatgacagatacacagaacacaggcagcagatggatgcacatgtaaatggccgacacgcagaaccgatacgcggagagacaggtatacggcgcatggcagacccatcgatgcagacactcacagacaggtgattgatagacaagatacatggatatacatggatgataggcagatgtatacatgggttttaaatggcaggtatgttcagacatgtaagtaggtgattgatacatacatgacagacagattataatgtatggaatctaggatcccgatgaacaaagcaacacaaggttaaacaaagcacatgagaagtgatgcaattgggaggcaaggggcacgagatgctgctgatcacacgtgcacacacgcatgcacacgtacttacatgcacacatacacactcacacatacacacactcacacacacatgcacaggtacctacatgcacacacactcacacatacacacgtacctacatgcacacacactcacaatacacacactcacacacacacacacacacatacacacacacgcatgcacacatacttacatgcacacactcactcacaatacacactcacaacacatgcacacgtacttatatgcacacacacactcacacatacacacactcacacacacacacacacacacgtacttacatgcacacacactcacacatacacacaatcacacacacacacacgcatgcacacatacttacatgcacacacactcacaatacacacactcacacacacatacacatgtacttacatgcacacacacacatacacacactcacacacaaacgcatgcacacgtacttacatgcacacacactcacaatacacacacacacacgcatgcacacgtacttacatgcacacacacactcacacatatacacactcacacacacatgcatgcacacgtacttacatgcacacacacacactcacaatacacacactcacacacacacatgcatgcacacatacttacatgcacatacacacattcacacatgtgcacacattctcacacttgcacacatgcatgaatacactgtctcacacactcacacacacatgcacacatacttacatgcgcacaaacacacaggcacacacacacatgcacacacactcatacactgcatgcacatgtagttacacccatacatacactctcacacatgcacacacactctcacacatgaacattcacacatgaacacacactctcacatatgcacacacatgaacacatgaacacaaacactctcacacgtgcatgcacacatacttacatgcacacatatacacactctcacacatgcatacatgcatggatacactgtctcacacacacacacacatgcacacatacacacaggcacacactcacacatgcacacacacatacacacacactcacacactgcatgcacacgtagttacatgcatacatacactctcacacatgcacacacactctgacacatgcacacacgtgtgcctgcacatacagacacaccaaaataatggttaaaaatatattcaatgcataagccagcaacagtcactctcaagtactgcatgctgcgtgtgtggctgcacacgccacacactgacacagttggctgtctggtgctttcctcaagcccctccacagacactaacacactgcaatctaacaaccgatggctatgaagtcactcgtctctgggaatttttcagttcttgccatgttatagaacacaattctatcctcatcgatctatcacctggagccatctttggccaaagtgacattaagcagttcatgtctgtgtcttaagataaaatcataggctggatttatctttcttccctagaataataaaatacttcaataggaaatcataacagtagaaaaataaagctataccaaatgttcactaaacaataaatctgggcactctgtccttccctcctccctcctgccgcctccctcctcccctagacagattctcactacgtagcccaggctactatgaaaccgtggatcttacagttatgttaattattaatccttttccccctttcttaaactctgagccatctctccagccccctttttcccctctctaagaaaaaagaggcagtagggagttcggtgtggacagttctatctcctcaggttacctcaggtctgtaataaaaatgaatctcagtaattctagttgacatttactttctcattttgactgctattgtttcatttctgaaaaataaacttgacaacaatacatgccaggacgtggcaagcaaaggagagtggtcacatcagacaccttattttcttccatcgtggacacttctaaatggcaagaaatgcctggtttctcatgcataaagttaaggataacatcaaaagacgctactttcttgccacagagatctaagactctgggacgtaatgtgttacaagatacaacaagtttctgtcaagggagctagagggcatctgtgtgctgccatcatctaaggaaagaaaagctaagaattccgagatgttaaatacatggatctcttttctcccatcgtttaaggtgtctagagtaaattccaaccttcatttctggcagaaattatgttagcagcaactggggtatctaaccaggcacaaaaagatgaatgataacaaactagacaaaattctaggtatctcgcatgtaagataaaaagattcattacagtaccttccagcaaacatcgtttctgcccgggctgcaatctcatcaatgtcaggaacaatagctgtgaagacacacagggagagtcttcatcttgttttaattcatgttattttaacactttttgtgacaccgaacattaatagctcagaaagttacaatacagttccactcaatcagtgtgatggcgctttgtcaacttgacataatgtagaatcacaatgaggaattgtctatattgggttagcctgtagacacgtgggcggggctgtcttgattactaatgttcattgatgtgggaagatccagcccaccatgggtggcaccattccctaggtaggaggtcctgaactatacagaagtcaagctgagcacaaataagcaagcatgtgtgcaatgacttctctctcctgtggacatgatatgactgagtgtggacatgatatgatgacccgttctctcaagggcatgttctgtgacttccccgtcacgatagaccataacctgaagatatagactgaaacaaacccctttctcccctaaactactttttaccagagtattttatcacaacaacaaaaacaaaactagaacaaacttgaacatcttaattgcagtttctgcgtgtgtgtgtgtgtgtgtgtgtgtgtgtgtgtgtgtgtgtgtgtgtgtgtgtattcagatgctatatattgaatccaggctacaaatgtgctatctcactcttcaatcctttaatataagctgtgcttatattacttacactatatattactgccgtcagatgcgttaacagatcaacaggcatcttagcaaaggcgctcttatttctaagtgtgtatgtttgtatttgataagtcaaatatacatgtgtccctccataaaaacacacaatattgcactgctaatggcacagaagaacaattctttctcctttacttttatttcatgtgtatggatgctgttcctgcatgtttgtctctgcaccacctgtgtgcagtgtccacagaggccagaaaaggatctcagatgccctgggactagagttacatacagttgtgagacaccatgaggatgtcaggaacctaatgagggttcaagatcagccagtgctcttgacagctggtccatctctccagacccaagggaaaagcattttttaaggaattaaaatccatgtaaagagccactctgttcctccttcaatgtgacctttctacatttgaaattccttcttccctaccaactggggagaggaagggccaggcaggtcataaccaaccagggagcagacagtgcatgaactgggcaatgctgaagcattggcagcagtggcttccagaaacagtagtaagaagctcctctgggaaagagcacctgtgtcccatccagccttcagtgccattctctgtatgtgacacccagcagcgtcagtgacctctggagcatcagaaccacctgcacctagaggagcagccatcagtgactcagccctgcctgctcctggaggagcaatcaacagagtggcatcccacaactacaccaactggagaaagagggatgccctgaagcacaggctgtacctgggctgatcagaagaagagatggatagacaagaagataagaacacattcaacaacatgaagagtcatgtggcgcctccagaaactagggactctacaacagcaagacccgaacatcccaacacagtggaagcagaagaaaatagccttaaaacgactttatgacgataatagaagcccctaaagaggaaatgaaaaactcccttaaagaaatggagggaaagacaaacaaaaaacaagaaatcaacatatccctaaaagaaaaccaagaaaaggcaatcaaacaggcaaaggcaacaaacagttcaagacttaaaaaatgaaatagaggcaataaagaaaacacaaactgaggaaatcctggaaatggaaaatctgggtaaatgaacaggaaccacagatgcaggtgtaaacaacagaatacaggagatgaaaaagataatctcaggcactgaagatacaacagaggtaatagattcatcagacaaagaaaatgttaaatccaacaaattcctaacacaaaatattcaggaaatctgggacaccatgagaacactggatctaagtataataggaatagtagaaggagaggaattctagctcaaagacacagaaaacatattcaacaaaatcatggaagaaaacgtttccaatctaaagaagagcatacctatgaaagtacaagaagattacagaacaccaaatacgctggaccaaaaaagaaaaaaatttctctcgccaaataataataaaacactaaacatacagaataaagaaagaatattaagagccacaatggaaaaaggctaagtaacatataaaggcaaacctatcagaatcacacctgacttctcaatggaaacaatgaaagccagaaggtcctgtacagatgttatgcagacactaagggacactaagggaccatggatgccaacccagactattatacccagcaaaactttccatcaccatagatggagaaaacaaaatattccatggcaaaacaatatttaaacaatacctatcaataaactagaaggaaaactccaacccaaggaaattagttacacccacaaaaaacacaggcaaaagataatcccataacagcaaattgcaaagcatggaaatgtatacacaacaacaaaataactggaactagcaaacactggtcattaatagcccttaatatcaatagtctcaattcacctataaaaagacacaggctaacagaatggatacaaaagcagaatccagccttctgctgcatacaagaaacacacctcaactacaaacacaggcattaccttaaagtaaaggattgggagccaggcattagtggtgcacacctttaatcccagcactcaggaagcagagacaggcggatctctgtgagtttgagaccagcccggtctacagagcgagttccaggacaggctccaaaacaataccgagaaatcctgtctggaaaaaaaaaggattgggaaaagattttttccaatcaaatggacctaagaaacaagctggtatagctatcctaatatctaacaaaatagacttcaaactaaaagtaaccaaaagagatgaagaagaacatttcatatttgtcacaagaaaaatccatcaagatgaagtctcaattctgagcatatgtgctccaaatacaagggcacccacatttgtaaaagaaacattactaaagcttaaatcacacgtgaagcccgaaacactaacagtgggagacttcaacatcccaatttcactaatggacaggtctgccagacagaaacctaacagagaaatagatgaattaacagatgttttgactcaaatgggcttaacagaaatatagaatattcctcccaaacacaaaagaatataccttcttctcatcatctcatggaactttctctaaaattgaccacatactcaccaacaaaataaatctcaacagatatttaaaaattggaataaccccctgtatcttatcagatcatcatggtttaaagttagaattcaatagtaacactaactgcagaaaacccacaaactcatggaaattgaacaatactcaaatgaatcaccaatgggtcaaggaagaaatttaattaaaaaaaaaaagaaattaaaggcttcccaaaattcaatgaaaatgactgcacaacatacccaaacttatgagtcaatgaaagcagtgctaagagaaaagttcatagcactaaatgcctacataaagaatctagaaaaattccacaccagtgaactaacagaacaagtgaaagcgctagaataaaaagaagcaaactcacccaggaggagtagatggctggaaataatcaaaatgagggctgaaatcaataaaatagaagcaaagagaacaatacaaagaatcaatgaaacaaagagttagttctttgaaaaagtcaacaagataaacaaaccaaaagtcagacagagaatacccaaattaacaaaatcagaaatgaaaaggggacataacaacagacactgaggaaatccagagaatcatcaggtcatacttcaaaactccactaaattggaaaatttcaaggaaatggacaatttcctggatgagtaccatatatcaaaattaaatcaaaaccgataaacaaattaaatagacctataacccctaaaataatagaaagagtcatcaaaagtctctccaccagaaataaaacaggaccacatggtttcagtgcagaattctgcctgaatttcacagaagagctaataacgatactcttcaaattgttccacacaatagaaacagaagaaagattaacaaactctttttataagaccacagttatgctgataccacacaaagatacaactaagaaagagaactacagaccaatctccctcatgaatactaatgcaaaaatactcaataaaatactgccaaatcaaatccaagaacacatgaaaaaatcatccaccatgatcaagtaggcttcatcccagaaatacaggaatgtttcaacgtatgaaaatccatcaatctaattcaccacataaataaactgaaagaaaaaaaaaacatgataattgtattagatgctgaaaaggcctttgacaaaatccaacacctcttcatgataaaggttttggagagatcagggataaaaggaacattcctaaacacagtaaagcaatatacagcaagccaatacctaacatcaaattaaatggagaaaaattcaaagggaatacaaattggaaagggagaagtcaaactttcactgtatgctgatgataggatagtatacatgagagagtcaaaaattctaccagaaactcctacagctgataaacacattcagttatgtggcaggatacaacattaactcaaaaaaatcagtagccctcctatatacaaatgataaagggccaagaaagaaatcagggaaacatcacccttcacaatagccacaaataacataaaataccttgggtaactctaatcaaacaagtgaaagacctgtatgacgggaactttaaatctgtggaaaaagaaatttaagaagatatcagaaaatggaaagatctcccatgctcttggataggtaagattaacatagtaaaaatgacaatcttagcaaaagcaacctatagattcaatgcaatccccatcaaaatccaagcataattcttcacaaacttcagaagaatgatactcaacttcatatgaaaaaacaaaaaacaaggatagccaaaacaatcctgtataataaaggaaattctggaggcatcaccatccctgacttcaaactctacttcaaactctactatagagccacagtaacaaaaaaagcttggtattggcacaaaaacagacaggtagaccaatggaatcgaatcaaagaccctgatatcaatccatataaccatgaacacctgattttttttacaaaaaaaaaaggctaaaattataaaatggaaaaaacaaggcatctttaacaaatggtgctggcgtaagtggatgttgacgtgtagaagaatgcaagtaggtctgtatctaccccacgcacaaaactcaagtccaaatgggtcaaatatatcagcataaaaccaaccacactgaacctcaaagaagagagagtgggaagtagccttgaacacaggagaccacttcctaaatagcacaccagtagcacagacactgagatcaacaattaataaatgggacctcctgaaaccgagaagcttctgcaaagcaaaggacacagtcaacaagacaaaatgacttcctacagaatgggaaaagatcttgaccaaacccacatctgacagagggcttatctccaaaacatataaagaactcaagaaactagacatcaaactacaaaataatctaatgaaaatatggggtacagatattgagagctctcgagagaacaatctcaaacagcagaaagacacttaaggaagtgctcaacatccttagccatcagagaagtgcaagtcaaaccatctctgaggtaccatcttgctcctgccagaatggctacgatcaaaaacactgatgacagctcatgctggagcggatgtggagtaaggggaacactcctccattgctggctgaagtgcaaatttttacagccccttggaaatcagtactgtggtttctcggaaaaatgggaatctgtttaccacaatacccagcaataccacttttggacatataccaaaggatgcattctcacgataaaagaacattttctcaattatgttcatagcagcattattcataatagccagaacctaaaaacaacctagattcccctcaaccaatgaatggataaagaaaaggtggtatatttacacatggagtactgctcagcaataaaaagcaatgacatcttgaaatgtgcagacaaatggataaaactagaaaaaaaaaatcctgggtgtggtatcccaaacacagaaagacaaatataatatgtactcactcataagtgggtattagacataaagcaaaggacaaccagcctacagtccataactccagagaacctaggtaacaaagacagacagacatggatctgcctaggaagggcaaacaagacaagatctcctgagtacattgggagcatgggggcagagggagggtagaagggaagaagagaggagaaagggagaggagctcaataaaaacaagctcaaaataaaagaaattccttctctttttcttgtagaatggggtggggtcatttgccatgtgacccaatcacaagtcctcaccatgccctgccaccaccatattgaagatacctttactaagacaacatgttcaaatgatagattatgtatttctcatatctagagcatgaaaagagatcaagatacaaatagagggggaaatcctatgagagagaaagagaaagagacagagagagacagagacagagagagagacagagagacaaagagagagagagactccaccagaggattttctggcgtgcctttaacctttgcttgggtactttactgacactcagagcttgtatttccagaagtctggcttctgggagccagtaactgttatgtttctgtcaatgcagccgccagcatgactttctggttctgcctgatcattcctggaaacagccctttggggttctgcacttctgggaaactgctgtgttgcaggggtgccaggagtggctcctcgcctaggcggaagggtggctgctggtctgcagggaaggctgcccgcagagcagaggtgggtagcgaggcaactggtctggtccccattctcactaaactagcaggcaatggcctgttcttgtctgaccagctgatggctggagaaggacgtggttcctaacactgtccaggagtttcctatctgcactgctgtctcagaagagttttgctaactggctgtctgtatcctaagatgtggtttatagaccaccaagacgcacctggcccaaccaggaaaaaggtgagctaacatttcttagtcttcacaaagtcctttctatagcctcaaatttcacagccatttctgtgctctttgggttatgctccaagtctcagagacattcgaatgtctaaatgtgagatgggattcctgagggaaagacacagagcctggcaccaccacaggcgagccttcgggagcccttcccctttgttctccggctaaccatggcttccccgcaaaccctgccctgccagctgcacttcacgctgctctttgatccaggcatgaacactgttctcaggttttcaccaaaagaacaaaatgtgcaaaagactctgactctgacgctgaagaggcctcaggggcccggggctttgatgactgtggtagccctcactgtggacctgcctgaatttagaatcaccatggaaacccaccctggctgtgtctgtgagggtatccgggaaggtttcatggaggtgggaagggccccctgaatgtgggtggcaccaccacaggagttcctgtgctaaaaaggggaaagtgaaccgagctccagcattcagctttccctgcttcctgactgtggagacaatgtgaccagtcacctcgcaccccgccccttgctgccccttccagactgaattgcttgtcacccttcctccctcctgttgcttccatcacagcaacactaaaaaatgtactgatcttcccaagtcactcccctgactgacttttatcatctgttaaattcgtaataacagcacctttacctatcacagtggaggcagtatgggacaggcatgtaccagacacagtgccaaaacagcaagttcctctttgtactgctctgtctcagtttcacctgggagagattgtcatcttctgacatagaaatacttttgttctaagacaggtatgaaaggtgcctggggtctttaaagcaaagagcaaaatcaaggatcacaaagaagcttatggcaatccattgttttgtaagctgattaaatacacacacacacacacacacacacacacacacacacacgtatgtgtatatatctatatatgtattcacacacgcgtgtgtgtatatacatatacgcacacatgtgcgtatacgcatatgtatatgcacatacatatgcaaacacattacacaccacacatgcatgaaaatgcacatgtgtatagacatatatatatacacgcacatgcacacatatgtggacacatatgcaaatatacatgtatgtatatacataccacacacatacatatatacatacagacaacacacatggacacatacacacatatgtgtgtatatacacacatgcacacatggaatctgaatgcaagcccccacatgggtagatggtgctacttctagcaaacatgggttattttaaattaaaacccagtgcaaggcacagaatgcctccctgtgagttattgacccatcagagaggcccaggggggcacccagaacaacacagattattgtttgctcctgattgcccctcaaaagtaaatgacaagagtcaattgctgaagacaccactgactttggactcaagacaaagagcagtcaaccccatcagagcccaggggagaaaatacttcaaccctcacctggctgtgtgccggaccctgtgtatgtcaatactgacacgctgccaagacgtgctcaccggtgcaatagcggcatgatggctataggagtgaccagccaccttttgattgggcctgaagcctgcacagcagcagggattaatgcctacacaatagctcatgatatctatgtttatatcattgcatagacctgtactgctctcagctctggtcagagaagcttcttgttgcgtgggaaaaggttaatgcagagaaccagtcaaaatacacagtctaaatcacaccgagtgctcagctggaatgggtcatctccagcctcctgccatcaccatccaaggcacagggaactttgtagatgtgtcggaaagaacgcaagagtccataaagggagaggagtgctttgagatgcccgtgttagaaatagtgtggctggcacactcaccaactcacagaagccttggacacctctacaagaccaggccggccaaaactctagcgtggatattggcaactgaaggctgctgagcaagagagagtcactcttctttggggacatggctattggtaggttgaccataccctagtgaatagtcacacacccatgttcatacgggcagcaccgagtggattcaagggttgccaataacaataaaacaaggaaatgaactggggagggaggtgaggtgtgtgtggggtgcaggggttggagggagatagtgatggatggatatgatcaaaatacattgtataaatacaagaaatttccaagaaataaaaagtatcatttagccggcattggtgacgcacaccttaaatcccagcactcgggaggcagaggcaggaggatctctgtgactttgaagccagtctggtctattgactgagttccagaacagactccaaaacaatacagagaaaccctgtctcagaaaaaaaaaagtaacatttaagataaattttaaaaagaacataaaatgcaagagcaaatcctatcacaaagttacctgatggtagcaacgagtccggggatccactggcagaggtgtcaccattgtcattgttctccccaaattccttcttgtatatggacagcatgtatgagatccggtaatccagcctgacgctcaggatgaactggaagaagcaacatggcaagcttagttccatgagccggtgctgagagacgccacactgctaagatggcgcagccagcagcacagcgcttaaacacgagacgcaggctggggaaacagctcagagggcaaagcccttgccaagaaagcctgggaacctgggttgcatcctcagaactcatgtgaaggtgtgaggaaggaaactccatcaagttgtcctctgacctccacaacaaacactgcgatatgggtgcccccatgtggacataatgaatttttaatgcaagccgtggcacacaccaacaaccatgctgtcaattgtccaaatgaaccaatcaaagaccttgtttgtaaactataaactctcggttgtttacctgttttggtcagttttaaaatgaaggaaaggattatgttttcattggtcagtactaatgaaagcccacagtaattaattaatttgtgattgtttttttttttctttttggttgtttatttggttgtttggttggtttgttggttgggtggttggttttgagacagggtctcctgtaccccaggttggcctcaaattccctatgtagcagaggatacccttgaactcctgttccccagagcttggatcacaggtgtgtgccaccacaccggtctacatcgagttttagaaacaaggaaatctggcaccccacactgttctctgaacacttcagggaggggcgtcttgtgtgtctgaagaggtaatgctggtatgaccccagacacactggcaataacctttgtggagagggagatgcaggaacggcttttgtgcccagaaagcctgcagctttaactgcagtggagttgctccagccccggggacatctgcccagaagcaaggacagccaggatggctggaatgctggtgcctgggtttctccatggtgtctgtgtctcctctgttatcatcacctcagtggctgagatgtggacagcgatgaagtagcccttaaggcctgagctctgcagggagccttggggaacccaaacattgaaaaccccttcctgaaaggagcaagtaactgcactgggaaaacgggggacacctgtgttaggaggtgacctgcaaggctgagccgtgggatcagagaagacatccggacggatgtgctcagatctcagctggcctgagatgggctggatttctgagcatagctattaccagtgtcctgtagtctcaaagggcctcctccttctgggaacgttagatgatgtggtagcccaggctttagaaaagctggcttctgtgttctcagcagccttctgctcgtttccacaaccctcccttcctccccaggcctcaccccctctctcagtgctcacactactttggcccatggccaccatgtcacacacaattttctgttgcaatttcatgtttcttcagcgtccactgcaccttgagtctcttctccacccatgagagcgagctctcaagacactgaaagtgtccgtatgacgcttcttatgattccatggccagggtttggatagatgccccctctctctatttccccctccctctcccttatctttatctcttcatacctccccttcctttccccctctctctccctccatctccacccatcctcgcccaacacacacttggaaggtgctgcatcaggatggaagaaagcctatgtcagctcctcttacttcagtttatccacatttgatagccagggaggaaggaagacggtgttgtataaagggtgcccacaggactggggagacgctgctcttgcgagagactcaagtttgattcccagcacccatgtcagatggcacacagccacctgtaactccagctccaagggatccgatactctgtggtttccgcgggcacctgcattcctgtgcacacaccacacacacgtacacacacatacacacagaagttaaaaatcctttttaacatagtactttaaggtggccagggtgtaaatgtggctcttgaggagtataaagtccagaagtaaagataaaccccacagtgactcttagtaacctgctgtgaatacaacacacgctcaatgaagagactccggtgaataggacagagtcagggctaggcaacaggtactcaatacacagtttttaaagctcaagtgtccaaagggcgggggagagaattcaatacgaaacactaatgaagcattcacgtctgttggagatgaaaactcacagaactgaatttcacaacctttgctcctctaatgtgtctcattatgaagatgcagatagtgtaaaattaaaaaaaaaaaaaaagcagatgacaacaaggcagagaaaggccaggcatggtggctcacacctataatcccagcatcctcagcacctgggggactgaggcaggaggattcccatgagttcaagatcggcctacattacacagtgagctctggcccggtcagggatacagaacgaaccttgtcttaaaaaataaaaataaatttaagaacttgtaaaggcagagagaataagtaaggtcagagggcaagaacaaaataacgctcactgaaaaccatgttcttcggtgaggtaaagaggggagcccccccccccaggaggaggggctggcagagggccagcagcagccagggcctgcggccaccaaggacttgatgaacggccgttctgaggaggcagcagattgacagcaccacaccttgaaacgggagaccctgggtggacagtcagnnnnnnnnnnnnnnnnnnccagccagactcagccacacagcacacttcccgctgtcactgcgaaaggcaccattgccaaaaccgcggttgaaaacggggccgcacgaatcactggtcatccctcatgccatggacggggtcgtgaggctgacctggggccccttcagtactttctcagcttcaggataaaacattacatatgaagttccaaggccatgaacacagggtggggaagcctgccaacatttcttgggacttggcctttggaaaccctggaggaactgggaaatgttttatgattataaatctaattacttagaatgaggaatgcacggagcctgccaggactgctgacccacttctggtagctctcagtctacgttagatgatgatgaaagatgtggggaaactcggttcacatcctcaaggcggtccggaaagctacaggctccattctctgactctggtataaacactacaacaaaggtaccatacgcctgcttcccaggcttacctcccctcccctcaaaaatgctagaaatcatatagggatctgctgcatgaaataactgagctcattaaattgataaaggtaggtattaaactttgctaatgtgaaaaaaatccttagcctcttagaaacacaaagggaggtaattgtgtaaagtaataaaaccaacaattaacaagtctggtaaataatgtcttgggggtgaagcagggtcttccactgtcaggctggccttgaactcacagaaatcttcctgcctcagcctcctgagagctagatttataggcgtatcctaacatgtctgacataaaactcttgtgtttcccataacaacaggaaatctaaaacatggaattcacaaacaagttccaagcaactgaaagcaggaaaatgattggaatcccatcattaaacatgcctgctttaaaaaatctctcttaaatgaagaaaatatccaaccggggtcaacactagctgatattaaacacacaggaaagcaatttaccaagctcaaagcactccacagctgctagacatcagctattctatcccagagtatttcaagggacagaaaccactggacgagtgtgcaaagaagcgatggtgtgcgatgcattgccagctctgcccttcacttaaaagtaataagaagatggggcaatagcttttcagaataaaatgagaccaataacatttcagactcacgtgacaccgacagcgtttcaatacatttacacagtgaaaccagatgcagtgcctaacatctggaatctcagcactcaggaagctgaggcaggaggattgccacaaggtccacatgagcctgtgccacacacacacacacacacacacacacacacacacacacacacacactcacaccacactcacaccacacttacaacaacaacaacaacacttaagagaaaccaatggggcccagcatcaccgccggagtccagctgcaggacgcacctgtagaatctcaatgaccttcagcttggtgtccatcaccgtcacgtcctcctggtcaccggggcttgcctgcttgctgaggtgggcgctgggctgcgcttcgggcacactcactgggaagatggagcctctgctaagcaccatttgggtcatcatctctcctaccccgtggatggtcctcatgacattgttgcctggcaaaagaagaggactgagttaacacgcgtaaaacctgggtggcctcggcatcgacacggcttgttaatttcatcatgaggacttggctgtgttcctcacacccccacatgtaactcgctgcaccttggggatctttgggttttcattggctattacaaaagctaggacgtagctgtgcaaagggcagtaggtgtcaccatgttgtagaatggcttaacaaaccagaaaaagaaaatggttttatctctaagatacagcgattagcagtgggggagcaaagactgtgaccaagtccctatatgcaaattaataaggttctcttatccctttcttataaaatgtttcagccctaaagtttaaaatctagaggaccaggaagagaggatggtgcctgttgccctccctgagaggctggggcagggggatggctagagtgaagaagctctaggccagcctgggcaacatgacaagagcctgcttcaaaagaaaagaggacttaaaacccaaagagcacaagctttcttcggaagctcagagaaacctaaattcaccatgtggtttctccgactgtcactggctctcatcattgctttcagaagtgacttaattaagtaacagagaaacaaggctctgccctgcacagcctgttgctctgtaaacaccttgctgagcgtggcccacaaggattgtttcaatggttttagttgatttttgttttgtttcttaagagaaacttagaaatcatcttaattggttcgaaacactaaagcagacctcttcacttatgcccctgaaggtcagcctgagaacccttatgacatcagggatggcagacccagccacaggctattttctaaacaggcctcccatgaaggtccgaagcatgtttgcacatgtgtgggccacccatactgtcacttccttatgtggcttccctacatctcaaaccaccttttttttttttttttttttttttttttaggccaataaatacctttgaaccacatccttagtgagaaggattggagtctggctgcccagggaataaagtgtctgttgcaaaactcatggttttagtaattaccaatacagcggggtggtggaaaggccctggctgggtaccaagagcgcacaaactgtcagatgccctattccatactcagaccaagggctgtggggctctcataacataaagagagcttggacatgggatcaaagcttctcatggggtgggggggctgtattctccaataagcttgcattcacttatctcctctgactagaaatccaattattcagaacctaggaagcattaccttatctgaggccattatagagacagatgacaagcacaaatgtgttcactgaggaacggctgcctgtcatcccgtgagtttgactcggtatccattttctccatacacactacacaacacatcttgcgcccacacctccacagtcagccagccaccggaacgccctgtcactcttaagacttgggtcccaccatgtttcctacatcccagctcctacaacaagcaactggactcaaaagaataagtatcaacccttctttgcaaacagtggtcttgggtgtttgtgaaattctgcctgaaggaaaggcctcggcatctggcaaagaacattccagaaatctggagggtgtgagccaagaagaaggggaataatgtggcacacgcctttaatcccagcactcgggaggcagaggcaggcgggtctctgtgagttcgagaccagcctggtctacaagagctagttccaggacaggttccaaagctacacagggaaaccctgtctcgagaaaacaagaaaagaaaatgaaaggcagggcaacagaaccctgaaggataaaagaaatgtaaactgtgggaatgctcacaggattaaggcacaaataataaattttaaaagaatttaaaagatgtctaaaggaatgtgtatgggctggacggcagtgcgccatggtagctatacacaagtacaccgttaaaagacggagccgctttgaatccaccgcctgctccaactgcatggctgcctgagtcaataaagggaaatgttccaggaacacgatttagagtgcatggagcactggccatttctcggatgggcatatttcaggcagaaatgatcttgagtttcattttgaagtcctggaaatctttgttatatggtgactgggataacaaaaagggggttagaaaattacataacaggaatttccaaggctggacagaggtggctgcaactcaaggacgtgagagccctctgctttctagcagaataattgcaaggcggaggcaaccgttgtccaggactctcaaacaacccaaccattgttcccaaatcactgcacagcccccatcttggccaggtgttgcaggtgtgctggtggtcacaggcagtgatggttttaagtcactgtacctttaccccactgtggagtatgtttatgggctagcctccgagggacgccttctcacactaatgaggaacaggcccctttgttaaccttaaccctggctcacacagcagtctgaggcacccaccgtgtctggatcttacttagatgtgcatggaaaataaccatttaatcaaatgattgttgggaagaaggttagcccagacaattctttccccaaatatagatcctgtcaccaacaaattaaaatccagatgccaaaaagcatcctaatgtctaacacatgtagtcgggaagataggagggtgcattcccaccctcccacatgcctgtggcatgtggaccacagaattctcctggcttttccatgtatggccaactcagaggtctccaattcaaagatgctgcatttttcacttgtgatgagaaatgctaatgccgtggacttctacagcttaaaaaacatcaacccaacccgtgaaaaccacaggcacacagagtgcccatgtccactgtacagatcacaggcacacaagtgtgtccatgtccactgcacaagtcacaagcacacagtgtgtccatgtccacttcacaagtcacaggcacacagagtgcccatgtccactgtacagatcacaggcatacagtgtgtccatgaccactgcaccgatcacaggcacacaagtgtgtccatgtccactgcacaagtcacaagcacacagtgtgtccatgtccacttcacaagtcacaggcacacagtatgtccatgtccactgtacagatcacaggcatacagtgtgtccatgaccactgcaccgatcacaggcacacaagtgtgtccatgtccactgcacaagtcacaagcacacagtgtgtccatgtccacttcacaagtcacaggcacacagtatgtccatgtccactgtacagatcacaggcacacagtgtgtccatgtccacttgcacaagtcacaagcacacagtgtgtccatgtccacttcacaagtcacaggcacacagtatgtccatgtccactgtacagatcacaggcacacaagtgtgtccatgtccactgcacaagtcacaagcacacagtgtgtccatgtccacttcacaagtcacaggcacacagtatgtccatgtccactgtacagatcacaggcacacaagtgtgtccatgtccactgcacaagtcacaagcacacagtgtgtccatgtccacttcacaagtcacaggcacacagtatgtccatgtccactgtacagatcacaggcacacaagtgtgtccatgtccactgcacaagtcacaagcacacagtgtgtccatgtccacttcacaagtcacaggcacacagtatgtccatgtccactgtacagatcacaggcacacagtgtgtccatgtccactgtacagatcacaggcacacagtgtgtccatatccactgcacaaaccacagatgtgcaggaggtcccatatccattaccacaaggaaatttctaattctagactttgaagacaagtccaaggtgaccagtactcaacgctgaaaaaaaaattctcactacttgttagccataattagctaacattttcagcttttcagttaagcagttaacacatattctttttaattctctggaaaataaacaccctagaatttcaattttttaaagataattaactctacatcaggaatttgagctgatagtatgttgaaagattagagaaaatgggaatcatcatagttaggtttaaaataaaaacaatcaggtgtgctctctgtgagttcaagcctagcctcatctacatagcgattccaggacagccagggctatatggagaccctctcaccaaaaaaaaagggggggaaggaaagaaaaggaaggaaggaggtatgaaaggggagggagaaaagaaaaagagaaattgaaaaggagggaagtacttaaagagggaaccccaattccgtgagagaaccctgaaatcaaaggatccgttgggaagacgctcttgtttttgttgccccaatgagccgtgtctcatttgtgtaacactgaagccgcacaaactaaatttaagttttctgtctcataaatcactccacggggacagagttacaaatcacaattgggtctgacaattattcacaggtggatttagaggaagctcgagacttagcagaactgaaatttacccacagctaatttgtgtcttgttttaagtcctctctgcctgttatctagagtcaccaaagagggagtctcaattgaaagaggagttgccctggtcacaatggcctgtggcatttatctctaccgttgatggatgtgggagggtccagcccactgtgagtgacaccattcctagggcagtgggcctgggctatataagaaaactatcccagcatgcccgaaagcagtctcctccatggttctgcccccacttcccttagtaactactgtgacctggaagtatgagatgaaataaccgtaccccccaccccatccctgcccctccccgccccctgcttgcttgtgtcagagtgattgctacacagtcacagggaggaaatgaggatgtcaccacccatcgcctctggatatcacagacgacttgggaggaaattacttcccatcccctacactggagacctaaaaggattttgcaccacacgtggccaagctccgtctcatcactgtcaaacactgacatttcagtattattgcaaaactcaggattttaatctgcaaaactgatccttaattcttcccagccggccagatgagccacacatggagtcaattctgctctgtgattgggagcatcagatgggaggtatgcagggttctcacaaaagtgcaggcaggagtacaccacatgaagtccagacggggacattcccaccacccagagtgctccctcacgccctctagagtcaatcccccaccaaagtccaccactccaataccaaagcaaccgtcctgagcgctctcgtgtcattcatgtgcacataaggtaccttttttttccttgtttgacttttcaggtgtgaggagacatgtatttcatatatacatggaatcatgtgtgtgtgtgtgtgtgtgtgtgtgtgtgtgtgtgtgtggcgctgcttagacccactcctgtcgctccaacagctccagaggcatccagttctcctcacagcttcagagacagaagtaaactcctcccagcaaagctgaggaaatgcttcaccactgtgaactggccaacttagctgaggggccgggggctcaaatctgcatgtggtgttgtttgcttctgacacatctcacagaaacatagatgaaccttgagtaaatcttccaaaaatctattgactcaaaatgactgaaaaatattaaaaatttctgcaccgtgattatgagcaaaccccgcctgagggagctataaagagtagctttgtctcgttttgtgaactttgtgtacacctccccgtcaatcctcctaaaagtactgacagtggccatctaaatagactgttaaaatggtacagcaaaaaggaccaaaagcatgtcgtgtaagtggccaaatagaatcataggtacaaaataccaggtggtgttttgagctatttgtttatcatgttgttttccattctctgtatgtctagaaagctcataaagctgtgtgtgtgtgtgtgtgtgtgtgtgtgtgtgtgtgtgtgtgtgtgtgtgtgcattgtgtgtgtgtggtgtgcacatgggtgcctgtatgtgcctgtgcattcacatacatgtgtgtaagcgtgtgggtgagtgtgtgtgcatgggtgccagtgtgtgtgaaagtgtgtctgtccattcaggtgcacatatgtgtgcaagtctgtacatatttgtgtacttatagaaaccagaggtcaacctcaagtgtcattctcaggtactatccagctttttgttggtggttgtttggttggttggctagttagttggttagttggttggttggctggttagctggttagttggttggttggttagttggttggttgattggttggttgattaattgtttggttggttgtttggttagttgcttggttgtttagctggttgattggttagctatttggttggttggttggttggttggttggttggttggttggttggttggttagctgactggttagttaattggctggttggttgtttagttggttgcctggttatttggttgactggctggttacttggttagctggctggttagttggtttgagacagggtttctcactgaccttggagtttcaccaattaggctgggttagatggctagtgagccccagagactcagctacctcagcttcctcagagctgggataacactacacattgctatgtctgacctgacctttacacatggattctggggattctgatcttcatgcttccatgacaaagactttactaagttaccttctcatttaataattttcacaaatcatatttggaatgatattttaatatgcaaatgtatgtatatttagggacagcatacaatttatgtatagtcaagtgaactgttctaaataaatatttgtataaaacaaataagtatatgttagtacactagacctgatacaggtcagctttaaaatcagaaacagaaccaattctcatagcttttcatttcactattgttctctttgcttaataaacctgaatcttcaagaccaaagagtcattagaaatttttttaattaacaaataaagacatgtatttgtaagttagggtctctaaaaagttttgtctgtctgattcacacttctcacaaaaggcatgtcacatatgtttgttctagtggtgagcaagacaggaaagggcagcaaggcttatcgatgacagcatgatccttagcaactgtgctgtgggacaaacttcacagagggtaccggcacaaacctacatgatacagcctgatgtatacctgggctaaacagcatgcacagtcttacatgtgatcacatatatatttgccgaacacagcatgctatgcatgactgcattatctgaggtatagatgcagctcactggagatggcaggagactgtgtagtaatatttcagaaacagcaagaggtaaaactcatgagatgacggcatttgggcacagctgtaagtagctgcgtcatcattctctagaaatggcaagagctacagaaagggcagaaagtgaaatttaagaggatgcctttgattgatagcagagtaccagagtcaaagggactgtaagaaggggaggagcaccagttccaaaacattaaaacactgtggttcagaaacaacaccgttcctgagacaagacagacaaccactggaaacagaacaatgccttgtttgttttaaacttttgatacaataaaatcacctcaagttaaagcaaaaattctttgtagatgcaaactgtcctgtactgacttcttgggaaacttgagaaaagcagagaacggattccacagcaggtggtgcacagaccctaggttgaagatcctaggtctctattgctgaagacaccacacactttggacacaggatttggaagattcaggctgtatctaatacaaaggcctcctagagcctagctttcatagtactagaaggtgctgtacaaactgttaaaagagcaaagcaatcaatattcctactcagttgtgacacctgtaaatcataacagtgaccagcaaggcaaaatacccctgtggtggtctggataaaaatggccccgcaggttcatgtatttgaatgcttggtccccagttagcaaaactgtttggggaaggattaggaggtgtggccttgttggaggaggtgtgttactgggcgtaggctttgacttttcaaaagactgcaacctccctgttagctccctctgcctagtatttgtggatcagacataagctctgagctctcaggtactgctctaggcccacgcccacctgccggcccaattgcatgctccctgggcatgacagtcatgtattctaaccctctggaactgtaaaccccaaattaaatacttcctttttataagttgtggtggtcatgatgttttctcatgacaacagaaaagtaagacaatctctaaagatgcaataatggtatccttatcttggagttaaccaacagctgtctaattggactgctcgatgggagtgaaatcatgcccatctaccagaaacagagcccactacccaggtctagtgatatcatgcatctcagaggagaacctaccaccgccatttgactagaccagcatgatttctaactctttatacccacacataagtgtaggtctcaccccacatcaaagaaacctctcttcgcagcaagcagatactatcacagaaaaacacaaacggtcaaattgcaaaggtcaactgattgtggggtgccattcccagtgggtatatctgccacacaactcctgccctaaaggcttagggagaatcttggaagaggggagcaggaagattttaagggccagaggaccaggaagtctactgtgaaattgtgtagaaacgacaaggaagctacacccatgatacgtcaacaatatggcttcctaaacaagacctaaacaatgaaaacatcaataaacatgctaacacagaaggaaatcacacagggtccagctcctaaacaaagaactacaggcaactagtgaccactgagggaggcataacttagcttctcttgggaatgaagcctctaattggttatccaacaaccaagtggtcagccctgaaatcgtatatacccaggacagtctaaatagactgggcaggttgtatttgcaaatgcatgcatttgtgcatgtatataacaacaataataaaaggagccatcaatttgaggaggagagtagaggtgtgggggaaggactggaagaaggaaaggggagagtgaagcaaagtaattttaaatgtttaattaaaaataacatcaaagatcaaacaaaataagagaggaaacacgtaatgttaggagagataaactggggagataggtaaggagttggctggaatggaacgagggtggggttgacctaatcgcagcacatgtatgcgtgaatatgatttttttaaagaggaggaggaggagaatgaggggagggaagggtgggtgcagtgagacccacagttgtggagcagcctttatcattagcaccaggagaaagtcaagtctgggactggaaagaaagctcaatggttaaagtgctttctgcagaactatgaggatctgggatcaaatacttacaagtcaggtataattccacctcagagggcagagagaaccacagagaagctagctagtgagaacatccgtagccgtactgattagctctgggtttgactgagatacctgcctcaaggagtgtgatagaagagtaatggagggtggtccccagcgtcaaccttgggccgccacatgctgcacacccccagatgtgtgcacatgtgtgcgcacacatgtacgaacacacacatgtgctcacatacgtatgcacacacgtgtgcactcacatgtatgcacacacaccacgtacacaaacacgcacacatgcaaatacacaccatatgcatacactatgcatgcatgaaaaggaaaacaacaaaatctttggattgtacttcctttgctataaaaagaaaacaattgtataatttaataaatgtgccacttgcaaataattccccagacgtcccatgtgttgaccattaagttcttctgttttttgtcacttctatgtgtgacaaagaaaaaaaaagtgcctcctgaaacaattcttcaatccaaacgatgagttccaccgtcagcgcttttaaatcacagacagcgaatgacggtatgatgctaggcaaagggccaagagccaatgcccttgcttgaaaacagtatttctttccctgactgacagcccagccaataagctgtgttagatggatgagtgtgaggatccgaatgccccctttacagtaagagacagggcactgtggccagctcccagtctctaagagaattctttttctttactggcttggttgttgttttgttgttgttattgttgttgttgggggttttgtttatttgtttttttttagttctttgagaattttgtacagtattttttgataatattcttctctctcccacaaattcctccaggatctgccacacacacacacacacacacacacacacacacacacacacaccttcatgtcctttaatttttcctaactcattaagtacaatttgtacctctcccgtagacttgggtatgggaacatccaccagagcatgaataacttagcaaggaccacaccctcaaagaaacatgattgtccctctcccagcagctgtcagtgatcgatggcttctcagctcggagtgaaactttgtgcccaccttccctctgcatgctgggattttgtctggcttaagcgtcatgggtcttgggcatgctcacctgctctggggcctggaagcggaagcttagctcgctcagcacacttctcttaagtggctctggagggggcacagacatgggcccctctctctctctctctctctctctctctctctctctctctctccacatgacgctgctcagactcacgtagtccttgttctctctgcacacaaaactcaagggtctgtcccctttctccccacttccagacttactcgttctagaagctcccaagccaccacccgggaacttttaggtcccttcctctctatgtgttctcatctatgtgactctctcggtatttcgactttctggggcgattatcacacaacccccttttatttctttaaggaaggaaggatttttcctggctcacagtttgaagaggcacagcctgtcacggtggagaagtcatggaggtagaaacgtgatgcaccaacttctcacgtctccacagacaggaagtggagcctggccataaacgtcagtgctctctcctagtaacctgcttcctccaacaagattcttcttcagtgacacaacaactgtgaagccagtgttcaaacacctgagcctatgaggacagtcacagtgtgtgcatgcttcccccaaattgagacactccctcccagagagaggaggaaaactcataggacaaaggaagtaaatgaaacacacaagactcaggaagtttctgaaactttacataatccataaaccccctcactgaggttatagatgcaataagcaattgctgggtgggggagatggctccattctgcctggctgccaggaagttgtaagggagctccagggttgagcttacctgagctgcccatgctgggtaagtttttgagtcacacatattcctgttagtaacacagtaactcactggtcaccgagctagatttgaataggattatccctttgctctgtcatcagtgcctgctccagagtaaagagacacgtgtccatatccctagtaaaagctacacaaaattttccctagagatcctagtagttggagctctcagaataactgttcagaccatcactgtctgtttctgctgcagtaactaagtctttgctggactagggactcaagctgcactgaaggtgaaggacttaaatgttttgtgtgtgtgtgtgtgtgtgtgtgtgtctgtgtgtctgtgtgtctgtgtgtgtgtgagcacgtgtgagcgtgtgtgtgtgtgtgtgtgtgtgctatgttaaagagactgagattggggtaacagcaattcattccttcagcttttctgtaaaaccctcatttgaaattactgatcagacagacagtccctctttatgcctgaacttggaaatctggttttccttttccattatgtcctgggtactactgtggccattactgtgctctgtgcagaggccctgcccccagccagcagcttcagcactgtgtcactcaacatgactcctgggcagggtatcccagcttccctggtgtctcacaccttcttccacaatgaagccagaagctaatgaatgactgccacaaagacatatctgaccctcttatctccgtgtgagacaactcgtgctgacttgaggtctcagttcaactgtactgaacatctgctcatctgcccaatcctcctcctctgacatcctcacagggttatgcccagcacacacactccctcataactcctagaaacaactttccatccgaatgtaatcaccattacaaaaaaaatgtatggttattatatggacactacggaaagtccatatagatgcaatctgatggttcagatccccagaacccatggcaaagccaagcaggcacagtagctgtgcagccccagcactcctggaagcagagacaaggggctccctagggcaatacctagagaagcactctgagtttatcaggaaatgttgcctcaattaataaagtagacagctgtcaaaacggacactgactgaagtccgcttcagacctacacacacacacacacacacacacacacacacacacactacagtattattaaaggaaactgcttgaatgcccaccctgttatcatgtaacccatcaagagccagtgcctgtgtggattgcttctctgtatgtttgtttttttatctcacccctaattaataacaaaaacattatcacatttctcaaaagttcttacttccatcttgaaatttgcttaatcgttcaaaatacgatgacatgggggtctggacgatgtctaggatggccagcagggtccttgtcagccgcagcagctcactgaagctgtagaatccaaagtatatcagattccgagccaggtggaccaccttcacaggaagagcagaggacagaacagcattggaaaatggaataaacatttgcaatttttacatctaaagtggttctggtgtttctaagtccctaattctttaatacctaggatttaaaacccctgtaaaggctgctgttcagattctgactgatccaaatctagggtctattcataagaggccttaaggtgatttaaggagtttatgttacaatatctaccacttaattaatgtaagtcaggaagataccacttaatcagtggttaaattactttaataaatgtgagccataaaatggcccagagttttatgtccccaatcctggcctgtggcctccttggtactagagaaataattaagtgagatgcagcctccaagatacggctccaatgtcggctgtcctcccacgatgtgtcagattggcgtgtgcctcagcagaaatgctgcgccatatcaaggttagccaaggttagacactgcatttaagtattctctctccctttctcactctctctatttcccctcccttccctttctctcttcctctccctctccccctctctatttccctctcactctctcccctccttactctctctctctctcctctcgtttttcttgctctcactctgtgggaagccaggtacactcatggaacactcagcccacagaaaagccatgtggcaaacagctgaggtgtgtggacaagccagcacagaagcagagccaccagcatccacctgagcgaggcagaaatggcaagcatttccagtagtgactgaacagacaccgccataccatacccaggctagtgactggcagaactgaagtttactttgggctgccacactggggatgagatgtctcgtgacagtggacagctaacacaccaggtatggtgtgacagtgttctctctctggttttgctattacattgtcttcaaatttcaattcatgtcaatgaggctaactcatcattcctgtgaagatgggggaaggacatctaaatacaaagtatctaaaactgtcactgtttaccaagtacaacaaaatttacatatatgaaagaaaaataaaacaaggaaagctataataaattgataattgagatagaacattttaattatcaaggcatacaagaattaaaataaaatgagcttttatttgtaattctattgtccattagtataactggggcaaggcattactagtcactgagtacatatgtcacctaactcactaagaaaaggtggggtttttttcaaatttgtacaggggaaagggactcgttatgtgacttgaagcttttctcttatgattcaaagagtgtcacatcacttgattgtggtctaattaacatatgaactgcatttctacacatcatatatagtttcaaaagtaagttaatatagatgccaaatctatatttttgtcatcatcagacagatttgtatctgcctgaacctaacaattcaacggcctagatatcctaaatatcagagggaaggaaaatctatggtgttcaatgcatctcatttctgacaagaacacacaatcatgccaggagtgactatttctttaaaacacctcaagtggggctgggagacggctcagtgtctgagagcactggctgctcctccagaggacctgggtttggttctcagcacccacatggctctccatcatctggttccatgggatttgacgtccccttctgacctgtgggcaccaggcacaaagaaaatatttaaaatttttaaatacctcaaatgtcagtttatttttctctttgtctccaaaaggaaatggctgatttacaacttctttcaaatattcttcaacaaattccattgtgagggcaaatttcctcttcatgtcatttctggaggagtctgtggtagagtcatacctgggcagatgacacaagagtgagttaagctgatgagaaacaatgagaagtgtgcgtgttatctatctgactcccagggtgcactgccttgcacacagtggggcttttatctattctgactcccagaatgctttcccttgcacacagtagagatgttacctattctgacacccagagtgctttgccttacccacagtggggatgttatctattcatactcccacagtgctctgccttggacacatcagtcaacttcttggggtacacatcctgtctgtggcaggggccactgccaactgagatggaacaagtgcggtggagtctgccaggtgtcacacactcagctgtgagtgttaggacttttgtttactagcctccgggaacacgtttcctgctggggagctatcattttgccctcaggacagggcatcttactgacccttcccaggtgaacactgtgaacagaaatgggcaaatcccttcctgtgtttttcttttcaaagttaaagtcactttgacttggctttcatctgctgactttggaacactcatcctcactgtcaacttggcaggatctagaatcttctagaaaacacacctctgggcacatctgtgaggatatttccagaaccaattaactgaagagggaaggcccactttgagtgtggagagcaccgttccctgggattgaaaccattactagatagagaggaaaaaatcagaagtgagatctttctgcccctgagaaaagattcaaggtgacgctgcctcgaggccccgccatgacgactggtccctcaaactgtgcaccacaataaagctgtttcttgtcagctatgagaaaagtaataaatacaatgtactggacagttttatgtaaacttgacaccagctggagccactggagaggagggagcctcgactgaggaactgtctccctaagatccatctataggcaagactgtagggcattttcttaattagtgacagatgggggaggggcaggcccctgtgggtggagccatccctgtgagcccgggtcctgggttctttaaaaaatcaggctgaacaagccatggggagcaagccagtaagcagcaccctccatggcctctttatcagctcctgcctccaggttcctactctgcttgagttcctatcctgacttccttcaacggtgaagatgacgggaagcaaaaggcaaataaaccctttcctccccgggttactttggtcatggtgtttcatcacaactaactggggctggagagatggctcagtggttaagagcactgactactcttccagaggacctgggttcaattcccagcacccacatggtggctcacaaccgtctctacctccagttccaagggacccaacaccctcacagacatgtatgcagtcaaaacaccaatgcacataaaacaaataatttttaaaaaatagtttccaaacatactcatgaatcgtgatctttgtggggatttcggtccagagccgggcgtagcggacaggcaccacagactcctggggatcccggtcaacgtgcatgtggagcatgagtcgacagaaagaggctcggaggtcaaagggcaggctctcatcagacacacagcgaaggatcaggtctacggaaagctgtgttgaaatctggttgatggccagatactggcggtccaagcacatccttgcgaagaggtttagctggtacctaaaggatgaggcatgttacgttatccctcttgcctccgttaaggcccctccacaacaaagcacaacacagccagctgctgggtgtgcagatgtgtttgtaagtccttacgacactgagccaaactcttttggccatgagcagatgacagcacgggtctaacactgtccctgttactacaacccctctcatggctaggatttcagccctaacacccagtgcaccaggcctggaatggacagtaagtcacatgaagccacctctctccaccctcccctgcctctgttgaagtgggggtgtggtgcctccagaatcgtcagacttatgtgacaagcatttccactggctgagacctcttgccagccctctggctcagttattgatcccaacacactgacccctgggaaccacctctcctgcttttgctaatcaacacgggtctccttccagaactataggcacctgcacctgccaagtgccaaggagcacacgctcacaagatcccatcttgccatgtctgtgagggccacccctgtggccacgtctgtctcatcccagtgcctcctccccctcagtccacagtcaaggtcctattgcttctcaccagccccgacatcccataggtaacaggaagaaaggccttactgacaagtccccaactcatcagagagtgcaaacaggaaacatgtgttagctttcattctgagatctctaggtggccctgactgtctccattcctctctttctgagttttcaagtgctctcttcttcgtctctaattcctagaggtttgagagaaccttgtggtgaaagacctaactatgcacctgtgtcgctgaccacacccatttgggagtggtcacaggtatgtacaggaggggaggttttaggttggttttcctctctggctgctgacctggggacagaatagagcctgggaggatgcttggagccagaacctgtggcaggcccccgccnnnnnnnnnngcctctagtgttgtgttctctctctgaataagccttttttaacctgtactgggtctagcgaatcttgattcccaggcacgacaaactacgccagctcccttcagatatttgatggagagtgcgcgtgtccccagtacctgtaataggtcaaaacttctaggtcagctttggtgccttccttggcttcctgggctaggtgccggatggccttgccatgaggctccttgttgctgtcaatccagtagagccacacctcctcgtcctcaatgtcgtcgggaaggatggagctctccatggggttttccacttgcatggacactagcctggaagacaaagacacacaaagtctatgaggcagcacacacgtgtggtgagggatgtccaacagacacctccgtgggcagcttactttgtctggatgaggatgtctgcattgccggggctcagcatgaacttgcagatgagttcctgagtgacagggatggcggtgctgttggacacacagaggtcagacagatagtccagaaacctaggaggaggaaagtggacgtgaaaaaaaaaaagcatttcatttttatgtctcaacagattgtcttttagtgactctccaacaatttcatgtttgcaagcagagcatcttgagtgcctccactcatcaatttaagtttgtttgtttgtttgtttgtttttaatttttaaagagcgcccatgtcaggacatgggttctggcaagccatggtattcgtggaggtgagaggtcaactttcaggggtcagttctgtccttccgtcttgaggcaaggtctcctgcttctgctggactgtgttgacctggcccagatttcccgctgactgtcctgcctcctcctcccatcttgctgtgtgacagctgctagtgtgacagctgctatcacagagtgtgccaagtgtccctgtcctcttctaccagacatctggggacagaacgtgggccctcaggcttccctggcaaaggcttccacacacgaacaacagcatctcgccagcacgacaaagcatcctcatagaatcgtcgcaacaaaaatgtaatttggaattgaataaaagaagctaaatttaacattgtttcagtgccgtgttttcctgtgtgctgttcgtctcctgcaccattaaaagcagaatagacaattctttctgttacgtataagccttgttcagaatgggttacgtttgcttctgtgttttaggtgatgcacatccatcagcacaatgactcatcctccctgagtgtctccaaaaccaagtagcaactgacagggttggggagcacacttcagaatatatacagggttagggagcacccttcaagagaggatggttggtcaaaggggaggccgctgtccacctagtattttactgttagaggactagacagagaaagcacagtgggtgttcttggcttctgtgttcactgttgccatctaaggcagcatggagtgaaagagaatgtgtagcccctatgacccggcaccccctttctaattgcttgtctttcatttctccttctaagtgaaggtagaagctgggtaaccccaaatgtgtggtcacttttatcatcccaacactcgggaggctgaagcaggaggattgccttagagggaaagtcaaccccggctatacagtgagttctaggctagctaggcctacaattgtgagaggaaaaataaaggaaaataaaactgaacacccctaggttcagttcccagcaccaaaaaagaaatagataataagtcatttgcttgattttattaaaatctaggtagcagtcagaatgcactgtatattattaaatgaagtgccccatcaggagtgcccaacctttagacaccacaacacggtgccatggcccataaatgtgtcagtcatcattcatctctcctaggacacatgtggcccacatctgcaatctgggcacctgagtgagtctatgtgaacacattttgggcttctggcttcttcttgcattactggggattagtccttgagccccacattctcccactgggctaactcctcaactgtgacagggccctactagctgttcttaaactcactgtcataaccccatttctagccttggaatcctcctgtctcagcctcctgagaagctgggattacaggtgtgaaaatacatgaatgtattttggaaaaccgaatagaagtaaatgagtacatttaaatgccagtctagggctggggtgctgtacagcagccaatcacttttctagccagtgtgagccttaggttggctccccagcaccaaggagacacatcaacagtgtctctaaaggatgctgatcacctgcgaagcagaactgctttacacacaccgttatcatggaaataaacgcttcgtctgcccaccaagagtcagtgctacaatagatgctcaccttttttatcttaaagaaacaaaacaaaaaccccattcttccatcccccagagcacagacctgggctcccggttcctcctgagcaggttgacgaaggtctcaatttcttttgcagtaatgtgcttctccagtagttttcggttgttgtgtaacaaggctgtgatcgtatcttcggccagaatatcatagccaatctgggactgcataacgcagaagttcttagcgatgtattcctgtagggaggaggaggcatcagaacctgtggagcacactgcctgcaagcgcagctccctggggggcagcagccaggatcacctgagccaccggacaacccagccgaagcttgtcagaagaaaaacaagtaaataacgcctcagtaaagagaattcctggagggaagtaaaggtatccacagtcaggtaactcaaactgtgaccgagggctggggcagagctttgggagaggtcactcacctggcatgtgcaagggtcaaggttccatcctcaatacttcaaataactaactaattaattaattaattaaaagtcatgtcactaatcactattttctaaatgggtactgacacccttgtaagtgagaaaaggaaatctaactatagtttttaacgtcatggtaacttagaatttcaccagcctgcaaggagcctctctgactctcaccagaagttataactataaataataaacaataataataatttttaaaatgtatgtgactgccgtactcctgggacttgagatcggtgcagccattgtttgaatgccctacatgggctccagttgtcttgtttgtttgttttcctcagattgacactagaatgaccaacaagatcttctctgataagtgacagcaaaaacttgacatacttatcagtaaggagcaatcaaataggatcacatggtaactcgaattattaattagattcagccatgcaataactgtttcatgatggcgtcaaaagctctggggatcacgctatgagataaaagagagcaaatgagaagacagacatgctttcacacgtggatgagcgacatgaaaccaaggatggagacgagggaggcagaaaaaaaagcaatgtgtgagcaaggatgaaaaggaggtaaggacagcaaccttgggagcgccaggagaggcttgccaagcaacggagtggcacccacaaaggccctgtggtagagaaaactgtggacacaggcacacacatggtacacatacatacaggtaggcgaaacactcatatcaaaatgttattgtaaccgtgagagacagaacactatggggagtttcagttatgcactatttagtcttctccctgttcttttttttaatatttattatttgtgtgcatacgtgtgagtctgtgcaccacatgcatgcaatgcccaaagaagccagaagagggcgtcagatatcctggaactggagttacaggcagttgtgagcccctgtgtgggtgctgggaactgaacccaggccctgtagaagagcagtcagtgctctgactggctgagccgtcgtctctccagcctgttccctcacccttcattctcactcctatatcccaaaccacaatcactggttttctcattctgtgtatagatagacccttagcactaaggttttctatttcaatgaccaaaggttttctatttctcggggtttctccttgggaatgcacctctgtttctcagatgagaaaatccatcgattagaaagtggcttttgccttgagcaaaatttaccggaacatacctactccttgaaaatgatattggttacacaaatctaattataacgccagcatcatttttttgtggtctttcggaatgatgccttgctattgggtagtcaattaactaaagtaaaagtcctctgcagtgtgtcactttagagctttatattgatttacacgcgtttatggccatcggggtcgtactgtagtgtgaggcaagcttccaagatgctgataaataattacatgaaattagaggtgatattgggttctctaaataatagtaaacccaaacacaacgttaaatacctgggccagcactaaatcacacatgagctctttactggtgtctgaaatgcaggtggggacaataggaattctaaaatttgctttggttatctacattttaaaatattttcccacaagctacttacagcagttagggggaaagcttactgtggctcacagctcaagggatacagttcactgagggagggaagccagggcaagggagggaaggtggcctcattgcactcagttggggggggcggggctcggctcactttctcttttttattaccagcccatgagacaggtggtgccgcccactggcaagatcctgcatcttcaattgaagacctggacacaccctcccagacacgcctgaggtaactctcctcagtgacctcacacgggtcactcttgagagaagaccatcttacactgcttctggctcaatgccaagcatcctcagctcttttgagagtttcacacacgtatgaaggatattgtgaccatgtctgtgcttcatcggcctccctaatttgccgctcgcccctgcagacccctcttcttcctcccgattagccccgtcttgttgtgtgtgcaggccgtatgcagataacacagctactgtgtgcaggtgaacaccacatcgtgtcacgtcatgccatatccagaagacagcatttcacagggctcctaccctggcctccaactgttacaatcctcccatcatctcttctgaaatggtcccttggtctttggggatgataggggtacccccattggggtctgagaaaatgcaaacacacttaattcaacagaacagaaaaaagggggtccagacatagcttagagtcaatgagattctgcaggaacagtgagcaccaaggagaccttgctctttggtcagatcagtgacttagctctggggagggaaggggaggtatagatgacccacagtgacacactgcaaggaatctagagagtgtgtaaatatcaacccaggcaggtgtgtgtgtgtgtgtgtgtgtgtgtgtgtgtgtgtgtgtgtgtgtgtgtgcaacacgtgcgcgcatatatgcacatgttcaaatgtgtctgcttgacaggaagatgggtgttttcagggtgaccccaccctgtgctctgaacaccaggtgccagatgtgagcaaaccactgtcttatgctgctgccacctggccatccttgtcatgatgcccttaaactgagcccagataaacaacttctccttcctgtggctccttgacaggctttgatcacagctacaagaaaagtaactcattcaggggacccaggaagagaagtggggaggcatgaaacccgctgagctgcctctccaaccgaccctgtgctcagatagtcgggtgctgcacaggactgtctccagtgccacaaccccaatgcctaatgtctgtttcagcattctggatctatgccctttcccggggagacaggaacattactctctatgctgtcatcccactggaatgtagtgaaactattagtgtgacccccgaagccacatttcaaccacaaagaactaggtttctcacccggagggtatgagagatgcccattgtattatatattgtatgacatggatctaaatacatggtatgtgtaagggcctgcttaaactgtcagtttgttcctgttacctaacagatttacttattgtctaactaatctgctttacatattcttttcagacctttcttaatctcgaaagctgaattccaaagccaacatattttaacacattcttcctgaaggaaaaaacaaaaatttgttttcttgccaaaatacttccaaactctcaatgatgactcagaacctgggtttacacactggatccattcttaaaaccatagcctggcagctgagggtgcagctaagtcatagtgcccacctggtgacaagtttgtttcccaatgccaaaaaaaaaaaaaaaagaaaaagaaaacaaaaacactgtaagtctgagcatcctgcttggcttcttggtctcagtggatttgtgaaaactgttaggcttgaaacaaagtgagtgaaagttgagtgttgcccacttgccttgaacctcctcatcagtggccttgagctctgtgcctcaagccctgcctcccagccttctctcaggccatactccctcatgaactaaactcagcaactgatagctcatgcctttaatcccagcactcaggaggcagaagcaggcagagctctgagatcgaggccagcctgatctacagagcaagttccaggacagccaggattacacagagaaactctgtctcaaaaaaaaaaaaaaaaaaaaaaaaaacaccagtgatacagatccttctactggataagaagcacacggagaacacaatgccaggtcatcaataatgtaaatacctttatgtcaaacatttgcattattgaacccaatgcaaaatattacagattttttaaagatgacctgtatgttgtgtgtatgcactttgcatatatgtatgtatgtatgtatgtatgtacacccatgtgcctgcagtgccaacagaggccagaaggaagggacattggacacgagctgccttgtaagcactgataattgaacccaggtcctgtagaagagaagccagtgctcttaaccaccgaaacatctctctagactctctacatatttgtaagacaaagtgagactcgaaataactttcactagcagattacagcttttggctccatccctggacccacacaagccgcccactctcctccacagttcaggctgccctatgaccacggcgaccttgttgatgtcctaaccctgttgcatgcgcagatgcatcagaacacgtggtccccagcaggggtaggagttgtggaagtctcagcctcccggtagagcctccgggaggaagtgggtcactggggataggcctttgggttttataacccaacttcctgtttgctctcgcttcctgtcttccaagaggcgaggggtcgccctgtgccttcccctccatgacagtctggacaccctcaaactgtgggtccaaataagccctccctcccttgagtttcttcttgtcgataatttatggtcacagggaagaaaagtaaccaaaccgattatcctgtctcactaaaatgcatgttccatacggtcatgaagacggctcccagcccccaccactcaagctcgccagcctgagcgtcgagcatcgcattcctctgcccccatcccatccctcctcccctcagtccctcctcctgtttcaggtgcaggttgaatcttggccacagatggtatcttagtaggtatgcaggcacacagcaaggctgcacctcccaggcacaggccagggtaccctgctcagcaggagccctccgggaccatgcccagaagcgcagcatccccgcctgcaagtcaaactcctgtccggctcaacagccctcacggacggttctctgagccgcccacataaagcccttctttgcaaagttcgagttctgactcctcggtctatactttaacagccaccaacaccagggcgcgggctccctacccacctggttcttgcggtagtcctgctgggaatgccgcaggacgcggtagcagaggcgcagcacgtacttgtagggggcatagcgctggtcgcccagatcctccagcctcagcatcgagccctctcccgccttctccttgaaaggcgctttaaggatcccaaacacctagaagaagaagaagatccttctgttttatggacatgcgtgtgcactctgcaacctatttgcatttttaacaaataacaaggacttaaaagcactgtagaaatgtgtaagtgaaattagtgcaaaggcagaaggtacttaactggctgttagtcctgaataataaataaaacactgtcgaaccaaaaactctctgctcacgagagcacccagtcaacaagtccactatatcaatggcatgattaattttatttagaaaccgtattttattaagataggaaatatgaaggtgtttgtatcaagctacatggatatattcacacgaattaaaatatattttctatatgcttttattattctgttatttttctataactttccaaaatcaaaataatattaaaaaatgttaactttttacctgaaacttacaacaggtaatgacttccaaatgtcactcttacctccttttaggcaaaaggaaataactccaaatacatatgcccccaataacagagatcctaaatacacaaaactttctcagagggtttgtccactgttcacagaacgcagataagtggccatgggaatgaatgcatccacactgaagtcttaacaaggaaccacccctgcatccccactccctcagcccctcccccattcccagggagccaaattcttgccttctggtgaggagccagcaggcttagttctctgtgaggaacatgagatcaagacaatgagcctcgaaataagaattcaaaatggaaaggaactgtcccgtggagttcatgaactaagacactgtggttttctttgagcctttggtgttctcaaagagtcttttttgcaacaggtggagactgccacagagatctacaactggtcaaaattcagagactaaggccctgggggcccaagtctatcaatccatctgcacaggtctccaacctctaagtcttgaaagtcgtggaggagtaagagatgggaagactgtaggcgccagaagcagaggacagtgtcctaggagagtgtcctcggtgtgcctcccacagccagtactgggcacaaatgagaaggctaaacggactcagtcccttgtatgtacacatgcatgtgtgtgcgtgtacatataataataattacaataaggggacatcatgaatttggaggacagagaagttagggggggagggtggtgcagatgtgataaatgcagttagtgtttatgtgtgaagttcttaaaaataaaaattatttttgaaaagaagaatttgatgttccctgaaccttgaattttatatttgtatcatgagataaaaaggttggagacatcagttaatatctcataattcactcaaagtcctaaaagtccctgaaatcaaatgctttctaaaaataattcactgatgactaatgagggtgtcctgtgtacgtgtttgccctattggttgataaataaagcactgttggccaatagggaagcaagttaggcaggactaggagaggaggaggattctgggaaatgtaggaaagagagagagtctccatgtgatcccaggaagagaggacacataaggctggagtcctgggtaagataagtccttataaaaacatatagattggtagttatggttggtaattaagactgagctaacaaataaatcctagtcattgtccagcagcaacgtagctgatataagactctgtgtgttattcaggggctctaaggcggtggcagaacccaggcagctggtggaaagatatatcgttatagatggcagaaagactttgtccctgagactgaagggaccagcttcccttttggcagccataacagccgaacacgtgcttctatgaccttgtcctagacactagaaagtcagatgcctgcctcgtgacaaggaaacaatcagaagttagctggtggtgctatgctttacgaccctgagtgtgctttacggacaagtgcacagcaatgacgcacaaagtatagcaaccaccctggagggcctatgggccataacaaccagttgnnnnnnnnnnnnnnnnnnnnnnnnnnnnnnnnnnnnnnnnnnnnnnnnnnnnnnnnnnnnnnnnnnnnnnnnnnnnnnnnnnnnnnnnnnnnnnnnnnnnngatctctcaggaggccctaggagctgtcttttgctagccatccgccatggtgggtgggtgaaagacccgagctaacatggggttagctcgttaaattacaataaagcctcatgcagtttgcagcaagctctcgaatccgcctggtgattggggtgacggaagacgtggcctgggaccctggatacttgagttttccgggagtctaacaagacctgagactttatttctgaaaagcactgtcttcagacagtctatagatactagctgacaacgggtcttcagtttttccttccccagctcagcacagtatgttagtttttttgttgttgttggttttttttttttggtttttttttttttttttttttttttaaaagtccaggtttggttttttgagacagggtttctctgtgtagctttggagcctgtactggcactcgctctggagaccaggctggcctccaactcacaaagatccacctgactctgcctcccaagtgctgggattaaaggcgtgcgccaccatcacccagcagttaatgttaattataaactaatgtcatttttgtgttttcaattatccatatgtggttgatacagaagctaattgttttaagtagcaaataaaacaataaaaagatgtgactacagggatgtccatgcaggtcactggaaagcaggttaatttactagtgtgtcatgcacttcagagatctggactggactgctgtcttcctagagcagatggaagcaggtagaacagttccaaagtcacctgggaatttgtttcttaagatgctctgaccacaccggtattttggagatgtgtggtgggaacctctaagctagcctcaaatggtccctaacttctgccgtccatgtccctgtgggattctctctctgcttctaaccagtcacacagaactgatggatatgggatctatggtgatgttttaaagactatgtataagcattacggctctgatggaaaggtattctggcactctggagccaaggaaaactgagtgttacagtctcaccgaaacctcattcacgagatttattgggagggaagaatccaggagagtggccgcctgtgtcagagtggaagaggacagtcgggcagcccaaacagccacatgctgaacaggcacaggatttatacagggcttcttaggggtggagttttccaggaagaagactttcagggtgaggattggtcagatttcagtccctgagctcaaattgcctagatctcatgctcagggattggttggttttctgctcgggttcagggtcatatttggctctggtttcagggccaaagtgtgtttctttcactggtccttttagccttttggctctaattttagggccagggtgtatttctttcactggttctgattccagggacaaagtgtgtttcttgggcactggtttcagggtcagggtacatttttttttttttttttttttttttttttttttgtttttggttgcaggaccaaagtgtgtttctttggctctgctcagagtgtgtgtctttggctggcccttttttcctacactatggctatgtctaggtgccctctctcttctctggaatcccttgcttttaagggaaatgtcttggtgtgaggctgaagctcatcacagagaggaaagcatagcaggagctctcagcagctgctgtcactgtcctcagccaagcacagagagcacccaatgcatgctcagatctttctccattctctgctgtctgggatctccacccagagggtgggctggcctacagttaatgagtctgcctaaatcaactagcatagtcagggtaattccttataggctcatcagcccgtctctcggtgattctcaagccatcaaacttcagctaacacaaccatcactggaagctaacacaaccatcactggaagctaacacaaccatcatcacaggaagctaacacaaccactgtcacagaaagctaacacaaccatcaccagaggaaatgctgtatcctgaggcagacttgcaccaaactctatgtgccatctacttaagtggacctcctctcattctgtcttgagatgatggtagccctacataacacactgacagtccctctgaggatgcccctcagacactgctcttacatttaaagctcatagaaactgaaataagtgtctaggtgtcatttgttatgcagcaaggcataactgatactgtaactcaaaacaaaaaataggcaaatttggttctcgaagcaactcacctgtgccaggatgttttgttccctcattagtttctgccgttcccggtttggcttggtgatgaccacatccagaacatcctgtccgttgttagtcacgtcagccacaaagaagatgaggtcttccaacaacttagtcacaaacctatcacagagaaaagatgagacagttctgaactatcggaaattaagtctgagaactgaaacactaagaaagttaaactacttttaagaaaacataatcaacaaaatgtaatatctaatgtaattgctacttaattttgacatttcctatccagttccccctgccctccactctgattccaattctaatcaaatattgcaaatggttattaaataaaaatcctatgagtctcaagaacaaatgggcacggaagacggcacaactgtgatttaatgtcccccaaatattattgtcaaagcaaagctctgacgccaggtaatgtcagcgggctaaagtgagacggaatctcactgatggctgctcagagaacatttagcttcaacacattttctcttgttgactccacaactggaattaggtgtttagacacaaacaacaaaaggtccagttgtgtcgtgactctggattactctttaaaatggtaactgttgatggggcgagtagaacgttaatttttcttacttttcattttatcatataaaatgaaacatataaaatgggtgtttagcccaaggaggccagaagagggcatcagatcccctggagcattccctggagctggagttacaaatggttatgagatgccatgtgggtgctgggaactgaacctctgtcctttgggagaacagcaaatgcttttaaccactgaaccatctctccagcccaagaatattaagtcttgatggagtgtcacattgcattattcctaatatacagatgatgtgggacaatgctcttgtacaatgtaaagatttgtcactcatatttaataaaacactgatcggcaagtagccaggcaggaagtataggtgaggctaccagactaggagaattctgggaagaggaaaagcagagaaacagtcaccagccagacccagagaaaacaagatgagaatgacttactgagaaaaggtaccaaatcaccatgtggctaaacatagataagaattatgggtgagggctggagagatggctcagaggttaagagctagtggctgctcttccagaggtcctgagttcaattcccagcacccacatggtgggctcgttgatggggaatgtactactgtgtatgtttatcttattgattgttaaataaaatactgtttggccaatgagacagcaagttagacggaactaggagtcaaagaggattctgggaaatgtagtagagaagtggtgatccaggcaggaagtgacatagcaaggagactcatatttaaagaaggagaaacaggaagagccctcttttcccctccgctcctgctccagtggcaggatgtgatccaccggcaaggagggacgcctataaaaggcgtccgataagatagtcttataaaatatataggtttatgatagttaagactaagctaacagatgaagaatcctagtcattggccaagcagctttgaacctaatacaagtttctgtgtattcatttggaactaactcgggcaggcggctggcgtaaagctcacaagtggcggtggggctcaggcggcttttggtggaaagatttatcgtaacagctcgtgaccctctataatgagatctggtgccctcttctgtcctgcaggtgtgaatgtaggcagagcactgtatacataataaataaataaaatctaaaaaaaaaaatattctgacatcttggaaatttgtcatctttaaaaaaaaataattatgggtgagtttaagacaaaagagctagctggtaataagcctgagaagtaggccaaacagtttataattaatattggcctctttgtgtttatttgggacagaacggctggctgcaggaccaggcagcacggaaacttctgtctacatacagaggtgcctctggttatgatgaggttggtagcaagacaccaagcttcctctttacttgtttactcatgtgccaagaaaaaaaaaaaaaaagcaaacaacaacaaaaccacctgctggttgttgtcagctaaactcaaacttcaattctctgttaatggttatcaccctgtaacacatgccatcttgctaacttttatctaataattgattttctctgtgacttactttaaagcaattcctccaaattcaaacatgctactctggagggaggagagaggctcatgagactgaggaagaaaaacaaaacctgggaggctgaggcctgcagggctaagactgctgccccgggttctaggacagaccgtgggggaggctggggagagaggctctggggcccatgggctgccaggcgtcaccgtccctgctggggcagctgtcaggggtgcagctgcctcttgagtcatccgcgatcctgtaagtcacccctcacccatgttcctgttattagcgctccaggtgagacgcgttttggtctgacataggttccctatctgaggtgcgtttcctcacacgcccctaagaaaagccaggcaacagacttcctgtcgggtttagcgaagttaggtaagacatacattccgtatttaaagggaaatataaaaggccggcccaactcagccaagcgtaaggatgacgcagccctgctggaaggatgggcccagctgcagttgcggaaggcactgatggagaaggtcccccttgcagaaagcctccaacgtccctgcgcgggctgcagccaggcggtgcacaagggacaggagacactgatggagctgctgtcccagctgcgatcaccacgactcacgcaccctccacaccgacccctcgctgcgggctggccgagaggaggcagctggaggccacgccagcagacagaaaacgaatgagcacagagagaaaaagccataatgttccagcggaggtaagcccgcgtaattaaattccaaaacactcagaaaaccaatattaggaaagacagccaacatcggggctaaaaatcagaaggctgatattcatcgccaataagatccaagcaatgaagccattcctaaatgacatttaaatgagtgtgttgtcagtcctcaacagataaagaacttaaaactatatatatataaatgagcattccctggagctggagttatgaatgaagactaaatgggtaggcaaagaaccagcagaaatctgagcattaaaaagtgtatataaaatcatctaataaaagtccaggttataagaaaattagcaattataagacagtatccaaaggatacagacaatagcgtacagagatttttaaaagcagattacaaaagagaagttaaagagttcgagggcattgttggctacatagagagttcaaggacacgctgggttatatatgagacctggcctccaaagagaaaggaagggaggactggggagaggagatgagagagagaaggaagaagggcagaggaaaggaaggagtaaaagaggaagacaaggagggagaggaggagaggtagaagaagggggtaaagaaggcaggaacggggaggggcaccataattcatatgacgagttttaagagcccttgagctctgtttgttgcctgaaggcatggcggtcttcttaaggtgctgggtttggcagcaagtgtcgcatggcgtggggctggctgaataaacactctgccattgagccttgtccccagcccctagctgcatttagacaagagcccaatgaccttggcttttgcagctacttggagcacagtctgtgtggccagcacctggcacataacaagagctcagtctcacggaattagctacatgtgtgtacagctgtgacaacggacactctgtggacaaaccaggtccttcagaagtgcagcctgtgtggtacagagactgtaagacttgcacacagtgccttcccaggctccaggtagcagctgacacctcatggccctccctcgtcatgagtggggcacacacttctaatgctctgcttacttggtgcagtcatgtagaatacaaacagaaaattcaaatgaaaacatcgaaagctgaggatgctgagcctggcaggagttgcatccagagtcccttcctgggtcaactaaaggagagcacggtgtgtgtgtggggggggggggaaccaacatcacaggcattcagaggcaggtctgcaatgttctcaaaccctccctttgaccttggttttgaataaaaagaatagctaataataacttcactctccatgggggagagggaagggtgtcaaggctgccagtcattctcagaaagaattttctattaaattctaaagctgagagactaagagccccttcaccactctgcagcacggactgcatcaggatgaagggtggatcagcaaatgtaacttcccagttctcaggcatagtctccttgctgttattctccactaaagcagtgaagagagaaagaggcaggggatataaaaaataaaaatagggtcaagggtcatcctaatccactgtcctcctaagacatatccagaggggctgagtcccccccaacaagcactgggggagaaggccctggagagagaagcacccagagaggcccagcactcaatagatacttggagtttaccaaaggagacctcgtagagaagtgtgtaactttctgtgaatgcaggagacagacagacagaaacggattcatcaagaggaggcaaaagagggaaacaccccatctgcacactggaatccatttctgttgtgagctggccctggtctctaatcacatgaggccatacgagtggccggtttctgcttctggccttggtttgttggccaccacagggcagatgtctaaaggcagttgtcaaatgcaggctccccacaggaaaagcagtagtaaggacagagaggaggctgagaaccgtttgactgtcagcacactgacaatgtttgactttattgtatgggctgtgtgtaaaggtctccagaatgtatacatttagtgacagaacactctcagagtgtaatggtgggtttatccatcctgtttccttcttactcaatccaaaacttgtcagagtcatgtacaccatcacacatggtctagttcattcctgaccctggctatgtgctatcccattgtgtgagcacagaacaatcatatcatccttcaactacagcaaacatgacggctttcagttgggggtgcgtagacaaggctggacatttctgcccttctgttctggggattctattgaacagatagatgttccagaacgcccagctggggaatggacaccagtgagccacagtgctcccttctctgactttgcctgctgtggaatattattttaagatgtgttacatttgtctatgctgtgggacatttgttcaattacacaaagatggactgcattcttttattttgcatttgtttaactctgtgaagctgtgttactttgcctgtctaaaacatctgattggtctaataaagagctgaacggccaatagctaggcaggagaaaggataggcagggctgtcaggcagagagaataaataggaggagaaatctgggagggcagattgagaaacaagaaatggaggagagaagaacttgaggagccggccacacatggagtaagaagtaaaggaagatacacaaaaatggggaaaggacaaagcccagaggcaaaaggtgaatgggttaatttaaggtagtttaacaaaaactggctagaaaaaagccaagccaaggccagccattcataagtaagaataaaacgccatgtactgcttatctgggagctgggtgtcagcccccccaaaagagcaaagaattaagagttagaaacaaaacaacaactacatttgccatgcatttctgtctgggccgtttggtggggggcttgccatttcgatggctgcaggtgacagctggaatgcacgtggcaaatggctccttattgatcaaagtctgcagcaggtcatgaagagggaagagggcagacgtctttgctctgaggtcctgggagcacccaactgtcgatcacatgactggatcccccacttatgattcatgtaattttaccaggtggagtttaacccccattgctttaggcaggatgggaatagctactgaagggctgtgtgaaggcttagggcacgaggtggagacaatgatctctattacaaatggccatttctcgcatatttataaataaatgaataaccaatcgatggtccagtttctctgagtgacacaagcagagaatacactttcaaaaaaattacatggtaattacatgcaaaatatgtcatgaatccaggaaatataaaattctccatctaaacaccaaatcaagtatggtcctgtgagtctttaaaaagctttcaaaaatagagcagagagaaactaaaatcatctatttttgagccaagataaaatgggaaaagtaagtattccatctgacatttttagtttatttttattttttatttttatttaggtgtgtgtatctgtgcgtgtgcatgtgtgtgcagtgcctctggaggccagaggagggcgccatgtcccttcaacctacagttacagaacctgtgagcctgcacccccacacccaggccaacggttgactctcaatgattcaacgtcacatttggttccactcacctcctctcattctgagtgatgctgccattctccagttttttgaccgtggttgccagcactttgttggcatcattggcaaagtctaagtctcggacctcggacagtgggacgcacacaatggcaaaggcttctttgtcctccttagtctggcaggttccaatctgcaatatgtgtttccattaaacagcaacagtctctagagaccgtagtcctcagagtaagatccactggggtgggtgtggacaagacagagaaactccagaaaacaccatccacaatgaaggactttggggacacgatggctttccgtgcccaattcctgccctgctcttttttttaaggttttttcaagacagggtttctctgtggctatgtaattttagcaggctgacccggaactagatattgtagaccaggctggtctcaaactcacagagatccgcctgcctctgcctcctgagtgctgggattaaaggtgtgcgccaccaccgcccggctttcctgccctgttcttgaagagcccccaaagagggtttctttcacacgatgtccctcagtcccagatacttccaagcagagaaggtgcccctggaatcctcctgcacctttttgatgtctgcaaacccaccctcctccaacagccctgctgcagccacccaagtcagagacctaaccaactggcagatgttcacccccacgaaatcagctgcaaccagttctagcaccctgcaagacggactgtcagtcactctcagtcctgtgtgcacagcaggtgaaccagtcggggcacacttactttcagcatgacgggcctctcttcctccgtgtcgatggggatgctggtgctcgttacccaagtattggtgcacaaatgccttagccgcacataggagttcctaaaagcaaatgatataaaaaggcatggagggcttatgtggtgatatattgcttgtgcatttattgggctagctctcctcttaattactaacctgtaacgattaatctatgcatttctataaggtcttatcttaccagagaaggcccagacctgttactcctttggcggctacgatgtggtgtctccctggtggctcctctctgccttcctcttccccagaattctccttgtctggtagccctgcttatatttcctccctgaccaatcagtgttttattcatcaaccagtaagaaaaacatatatacagaaggacattccccccatcaggctggcaagagagctcagaggccaaaggggcttgctacgcaactatgaggacatgagttcaatcccagaacccactgaagatggaaggcaagaacccactctacaaagctgacctctgacctacacacacagacaataatatgtttaattagcaccctttgcatattgacatattcagcagatccatgtgtggtgtgaacagtaaatgtcatagactagtaaccgtctcaggatcttgtctggaatatgaaaattcttagatttagacttctctggagcccacggccatcacttcctgggccatcagtgtcaccaggaaccttgtcaaaatgcaaattctaagacctcactggtgcactgggggtgcggtcagcagtaactagtttattctgtccccagacagctaccaacctaaatgtactgacaacccctaaatcacggggctgctgtacccattgagggcaaacccagagcagttaaatagataagtggttcagagcagcccgacaggcacatccccaatatgaggctgagcaggcagctgctcaggttctaactcagacttcacaccatgttctcttagtgacacttctcagatttctgggttttgttctggtcttgctatttaattcggaagcaccgactctgggctctaagtaagaagattaaaacaattgccagggtgacagggaaaggagtggagttggggaggcgaatacgaacaaagtctggtgacatgtacaggaagacgccatcatgaagccatcactgtgtatgctaacttaaatttcaaaactttaaattctgtgtacatagttaaatgcagtgtccatagaggccagaagggggcatcggatcccctggagctggagttacaggaggttgtgagccaccctatgtgggtactggaaagtgaactcagggcctctaaaagagcagtatgaactcttaaccgctgaaccatctctccagcctaaaaacaaaataaaataaaaaggaaagaaagaaactatttgttgtgtgaagaatcaaggtgtctaccaaacacacacacacaagcttgtgtgctgactggaaggttggcaggtgatttcaaccaggagttcacaggactcacaccctgtgtcctccaagagcaacagtcacacatttgaccatgttttgagtcacgagtaacaaaaattatctgtgtagacgccatggcagaatgctggagagggcgcctagagctcggttccactcagacggccccttctccacacctcatctcttaatccaattatttcttcaacaagagtgcatggtgccattaaaataaaaaggcttttcacttagtgttcagcctaaagctaagacataaatatgtcatacaacccaaagtaaacattttagagtcaaagagacatcgtcaaggttcttgctctgctgtggaatattatcttaagccgtgttgcttttgtttatgctgtagagcattcgtttaacggtgtaaaggcgtgtggcttctgtttattctgcatttgtttaagtcggaagccatgattttttgcctgtctaaaacgcctgatggtctaataaagagctgaacagtgaggcagtagaaggacaggagtggctttcaggaagagcatacaaaaagaaggagcaaactagaaggagagaaggacgtcaggggacagccactcagccacacggtcagccaaggagtaagacggtaagataaacagaagaagggaagataaaagcccagagggaaaagggtaggtgggataatttaagaaaagctggcaagaaacaagccaaagtaaggctgggcagttataagaaaaatatctctgtgtgattttctgggggagctgggtagcaagtcccccaccacaagagcccaaaaagcaaagagtaaaaaaccaacaacattgctcattcgtaaaggtagataaaatacacactgagtttcaatatctagaatggccagcacctaacccttgtccaaataaccagaaacgcctctgttttagcacccagcatcctctgcactgacctaagcaggagacatctacagctgctgtctccactgctgtcctacgctctggaaaaatggggccacaggacactatgtggtggccagctcctccattcaacccttacatgtttcaacacaggtgagtttcccttcttcaaaatgctcgtgtggtggtttaaacattgcatggcttccatgggctcatatgtttgaatgcttggttcccagatggtggccttgttagaggaggtgtgtcaccggggtcagcttgaggctccaaaagtcttgccccattatagttgggtctctctccttcccatctctctgcctagtagttattgctcaacatgtagctctcggctattgctactgcacacgcctgcctgtggccatgttccccacctcctggtcatgaactctaatgctctggaaccatgaatctccaagttaaatgctttcttctacaggttgccttggtctcggtgtcccttcacagcaatagaaaagcaactattttattttttaagcatttcagtgtaggcgtttaatgagctcttttagaatgagacccaagtctagacatgacattcatttatattccatatgtgccttagccatcgaggccaaacgtaattttatacagtattttaagtacacctgcattttagctacaacccatcacacaaagtcaggtgcaggattttccacttgtgccgtcatatcacttctcaaaagctgtcacttcttgggtcatttcagattagattttcagatcagggatgctttcagcatggatgaaccccttgagtcaaccatcaacactactgggctgcaaactgaagagaagacccagagtaataacatgatctgcaaggatttaggaactaaataaccctgggaccatgtcacagatgtgtgctggcagtcaggtgtgacatggtctggttgtctacagtgcaaggctgctgctgaggaatggtagttcagggcagactttacaaaccatactccagggtcaaactgcacttcatgagcacagacagttaggtcagttagcttgtcccaaactctgctgtctgtcacctgggaagttctaacaaacccaaagcctaggttataacacacatcagttaaatcagtgcctagagtgagaggtaggcatcaggactggtcacagattgctaagtgtccattgggcgggaaagattgggagccctgctcaaggcccttgatccaaacagtgcagtccgtggcttgctggaaaatctctctctctcccagccccgccatggaccaaggactcaccatctgtgtctctatcagatccccaaggctgacttggggctcaccaggctaaagcaccactgtggaactctgacctctgagcataaaggccattgccatcttactcaggacaggtgtgactgtcccccaggattgggcctgttgatgttccctcgtgggggagggtaggaagggtagaagggtagtaaatacacttcttcctgcgtttcccaactatgtatagtctcatcaagttctagaatgcacggtagggaaacgtcagctaaagagggggtgccatctgtacggcatccggacattgtcatccatgctggagtcaagcctttcagtgacacagctgtttgggatcacccacattcccgtaagaacccctcactaagctccagtaagtaaacccaacagactcactggttcactcactggacttgaatggaatctttcctttgatctactgtggtgccctgtgtttggaaacatttgtacacatccctccaggaaaagatcacacggtaagaatttaaagtttggggaaatgctgcatttcatattggagccccctggataatgcttttaaaagatggggtgtccatatctcactgaaagactgacttcttcactctcagaagggccaggacccattgctcagatctttctcagccagtctgagaagacttgctctaactcagcctctgacctctgacccatgagagttacccagggtgaacccagataatggccttgaagaactcatggggcttggcacatagaaagcactggaggattttatatgaggatgtaaaagtggctagcgttaaaggtttattgttagctataaaccgtgaacagcagctgaatgcttcaacacaaaacccttcacaacggggcaaagaacctcagcccttctgaacagcagcagctaacacccctgtgcaatgtgagacatagcaaccttgtggtgggtgcatgcacctgacggtgagttcttctcaccacttcctcaggcaaattctcctacactgagttcaagaaagatacccatttttgcttagacctaaaatgagttaagtcagagtaataatcagggtcccataggttgtggttagaaagaaaatggcccccacacagagtggcactattaggaggtgtggcttattggagtaggtgtggcctttttggagtgggtgtggccttgttggaggaagtgtgtcaatgtggaggcgggctttgatgtcttatatgctcaagctgagcccagtgtggtactcagttcacttcctgttgcctatagatcaagatgtagacctctcagctccttcttcagcaacatgcctgcctacaagccacctgccatgatgataacaggctaaacctctgaaattgtaagccaggcccaatgagttgctttcctttataagagttgctgtggtcatggtgtctcttcacagtgatagaaaccccaactaagacaccatacaaaaggacagacacttggctcaggccaaagcagcagaatgtatgtcttcaggggctacattatcgagcaaggaggagggagagacagacacgcaacagggggttttcaggtctcttcatatccctttctggtatggctacaccaaataaatctcctttttcagctttctgtttttaatttgggtcttttaattggcttaatgagcacaggtggctggacccaacttggggcactggctgtgaaccacaagttcaagagtcacctgagctaatgtgtttattgctctgattgatgacccatgtctcattttgatgccaggggcgtggtctgcctggtaattgacaatcaacaaatacttcttagctgaaccactaaaagaatgagcatataaatgagctaggcaggaaatctgacaggtaaatgataaaatttagactaaaaatgctattagattattttttttcgttgtcgtgaccaaaggccacacaattaataagaataaatgactctaatacttttttcaggatgtctttggtactgcacattttagttatctatacaaataaaataagttgtgttgatgagctcacctgacagaggcacagcgctttgcatgcattttctccactcatgctcccttctgttgtaaaattgtaattatacttttttatttcttcctgttgggaggactattcaaagaagcatctgttcaccccaattccttttacttacttatttccttttattttctatttctttttaccttggaaccaggcagtcagctctctgaagagttgtggcatcaagttcgaaaagggatgcgatgtcatttccgtgtggtactgagactagcgtgtacataatcttctccccagtctggcgtttcttctttgaggttggaagctctccatctctctgttgaagaggctcaaggttattcggtgtcttcagatttagtgttagctgctccagtcaatccggagataaggtgtgagtttgcgttcttccattgggttataggagtgtctactctgaatcccccagaagatcaggcacatagcctttgtaacgattatgggcagtcatacggtccatgctccccagaggggtcttctaatctgagcatgtccttaaatcacaatcgttatggccccttctctagtggtttcgtaccctctgcatttatatcaaacatagagaagaagcagcgtcccaaatcctctaaattccatggactcaagaagacacacaaatgaccgatgcatataggtcccactagttacagggggaatgtaaatcaaaactgctgcaggcagcacacttctaaggacagcatgaccaaggtccagtgataaacggccaaaggtgcagagaaagggaacccttgtacccaccctgtggatggtatgtcattatgaaaacatgtgacccagggactctccctgtgggcatgaggatgtgagaaccatgcaggatcacattcaaatacaaaaatcacaatccctacctcacagagaggcctgagcaaaaaaccacagtccctacctcacagagaggcctgagcaaaaaccacagtcagtccctacctcacagagacccgtgccccaggctggctgcagaacaaaccaaaaagctatccttgtaaacagccaaagacagacagacagacagctgttgaaggccctggtgctgcgtcatgacatggagaataccacactatgagccagagcaactgagtcccagcaggcttggttctgccacaagccacaccaaccctagaccagcccaggaatccatgagcgaggtctctcatgcccacttcctccgagggaacccaaccccactgcaacactgaggatcaagtttccaacacatggaacatgggcagctcgcactaccgcagggcttaagtggtttgggcagatagggaaggttataattgaaacacaactgagctcagggaagtaagttcctattggttgcagtgaaccatgttttgaagacaagctttattggcagaagagggtttcacaacctcaacaattggagggccagtgttcagggttccaacagtgtctggtagaagaccaaagaagttgccagcattcttggaaaaatactgtctccctaaaagaagtatgccatctgatttcctagctcagccttcctgccccttaccttataatttatcttttgatacacaccactccagggggaaaatgtgctaactgatacagctatttagatctatttaggatctgaaagttgacagcatttgtgtggtctgtacatttagtgggattcagccctctgttcaccccaactttgagatgactttggtaaatttacaagaagatttcagatctagattcctagagatggcctcctatatggttctccttggtaatgtctgcctaaggggcccaatcagagtggtcaggggtctccctgtactgtgacgattgcactgcaatgactctttccaacacacctatttttaaaaactcactgattaggcttaattaaaacaagccactgctaattatccacagtattcaagatttgtaactacacagacagaacacatggaatgtgctattgtatttccccatccttcccactggtctttggaaaatagttttaatatgaagaaaattcctgtacataaatcatttcacaactgtgtgtggaagacttccgatgtgcctacatatcttttacgagggccctgctgtctgaagcttcctgctttggcttcccacactctaatttatttaacagactctgcttcataaacagtttggaagtaaacattaagcctgccccttggcatttttaagtaattaaatatgaataatgagttatgaacatacaagacacctggaaaacgttcttctatgcagacgccacacaggctggcgagaggcagggtggaagcctggcttctctgccctccttcactttgtctcagaagcctgactgaccctgagtgtaggcaggggatctgacaagtgtctgtcttcctcccccatctcaatgcccttggagaagtcattgtcctcagcctgcagtcaccttgaatccaagaagagaaatcctcaatgggtagaggctgtaccctgagcagaagtgatcactctgggggaacccattgatccagtcaagtgaaggtggcagcggtaacttcacacggcctgtgcagcctggtgtgagagagctgtaaccagatggagccttgaccagggctcatagtcggggcccaggcttactctggttaaaccgagagctcgagccaggaccctgaagacagacaagctcactggcccctcatctgctcctcttcctctgtggccaccctaaaaccgtttcccctctctgctcctcacaatcaattctctctctaactggtacatcaggacgtcaagcctggccgtcaggactgccagagccacccaaaaattctagttacatatataatagtggacgtagcttcaatagacaagaaaggaaaccctgtatcttaacaaaatgatgacaactctgttcaaactcacggactttgtggattctgtttataaacccacacttatttctaagggaagagaaagacagcaactgtagctccctgcaggggatttcagaagcacaatagtttgcctttcatcatggagcttaaacaggtgtctaatggaacaccagcaagctctctctgacgaatgcccagcttaggagctcaggtcccaggcctcctgtcccctgggtacttgtcagacaggtacgcttcagataagtttgtacatgtgtgggcatgcgcgtacacatgggagtggctgtgcatgtcctcatgtctgggtgcagaggggtgtctgtgtgtgtgtgtgtgtgtgtgtgtgtgtgtgtgtgtgtgtgtgtgtgtatcagagatcaatcttggacctcagtttttgagacaaggtctcaccgggacttggaggcagactgcccagcaaccaccaggagcctgcctgagcctctgcctccccagtgctggggttacaggacggcaccgccactggcagcaactggcagctactgtaagtgggtgctggggttgaacttaggacttcatgcttacaaagcaagcactcaaccgactgagctgtcttctcggccccagatggcacagatttccagggctacacagggagaaacctgcccttatgcaaagctacaaagaagctaatggcacctccctgggaggtgcacttcgggacaccccagaatacctttgtggtgactcatagtgagtcaccaaattttaggtcaaacttcacattgctggtactgttggagcctgagacatgctgggaggagctgaggttcaggctgcaggaggttgctgtgtcgcctgtcactggcacccaccccatccccaccctcccagttctgccttggggaagccacacactccaggctgcctagggaagtggcaagcacgctatctctgtaagcctcctccccagagcaggaccccttctgcttgcccagcctgcaccccttactgccagtgagcctggaataaaacccaaaatagtgtggaggtctgctggcacctgactccccatctccaaactctacagaacagaatttgaaagtattgtgtcaacagactccagctctagaacatccccaaggatataaatgcactcgggtctgtggtttgccacacaggagggttttgacaatcagaggacatctggcaatttctgaacacatttttttttttttggttgtcacaactgagagctggggcaggggtgtggttgctgctagcaccccaataagatgagatcaatgatgctgcccatcaccctaccatccagagggtaccccactaccatgcaggaagcacccactacaacccatgcaggtgacagcccaccactcacaccgaagatcccccactaccaccaccaagaattatctggtgctgtgtgtaggcattgcagacaccatgaaacgtccccctcaagcctccatgacagacactccttcaaaaggatcaggtcccatgccacatacacacggcaatgtccccctaacatgaatgacatagcagaaaaaaaaatcccctctgcagagctgtctgaaaagatgtgggctttcaagaagaaataatgaccatgaggtactcggctgggcttgacaaggtaccaatgtttgccgggtgcccagcaaagctgtgcatttgtaagactggaaataacaggcccctttgcaaaatgaacacggcaatttggtcttaatgggagccctgacacacacaccatctcatctcagccacaccatgcattaacctctgaaagttcaaatatagaaggcggtgtttgataaagatttctgaattacaggggaaaaaaaattagcaggtcattaagtcgccaacacagggaaaattaaggaaaataatcagcatggtcgcagatcggctctctcggcccctctcccttcctcctgcctcagccactgagtaacttggaagacaggtctgcaccacaggtccagctacttgtatttttttttaaacctactaacaccttttttgacctgtcttggttcttggagtacaaggtgaggtgggcaggcagacaccagcccactagacagcaaggaaagcaggtctctccagaatgtccacaagtgggcctgctgaagaagcggcccagacatgatagtaatacactctagacacaaaaagtagcatgcgaactcctcctctggccagcaccaaaacttcagcctcactcaaaacaagtataaatataaacaggcctaaccaatcaagtaagcccacctgtatctagagatgtttgaacacagagtgaacttccactgggccagcagcctgacacnnnnnnnnnnnnnnnccccccccccccccggctccactcctactaaaaccctgacaataaaatagaaagaggggtccaacgggattgagtcaagcccagaagctctttttttttaagatttatttattgattatgtatatatacagtgttcttgctgggaattgaactcgggacctttggaagagcattgccacctctccagccccccaagtccagaagttcttgctggacctactaagccatacaaaaatagactatgaagctggggagtcaggcaaacactgccaccatttaaatcaggcacttggggctggggctgaggctcggacggtaggacacttgcctatcatgtacaaggccctgggttccatgccccacgccacataaaacagatgcactggtgcacacttgtaacccacttagctgtgggtggacacaggctagttccacgtctcgctggtgtgaaaaatgctttagggaatcaggcatgaaagctgagggtcgatactagcttttatctgcggagggttgttactcaatagtgggtctgctgggttggactgcaattccgcacttaagttctgaggaattaccacactgtattcacaccgactatccaccccaccagctttgtaggaggcctctttctccacggccttgccagaatctgttgtgttgtctttttgacaatggtcattctagctggggtgagaagatgttacaatgtggttttgattttcattttcctgacaagaaaaaaaaaaaaaagaagaaagaaagaaacgcaacatgatactgtctgtgtgaggatgttttagacagtgcaggggacaaaaagcacagatgcatgggattacaccaagccataaaacagagggatgagggacagaggcagagacacctcggaaaaggggaggaatgtgtacacctcacgaggagtgaacgcccagaagtgactctttttagctcaaagcaacagcaaaagaataaacaacccaaaaaacattctaaagagacacttctccaagaagacagatagatggacaaaccaaatcagacctattaacagatccctggtgacagtgtcaacatgtcctcctcctcctgcctgaccaacactgtgtaccacaagaacagagggggttttttgttttgttttgttttgtttttgttttttgttttttcgagacagggcttccctgtggctttggcgcctatccgggaactagctcttgtagaccatctgcctctgcatcccaagtgacgggaataaaggcgtgtgccaccactgcccacctaaggacagagttttaaatgatgaagtaacatctgccaccttgtacacacactcaaagtgtgtctaacccagaggtttgtctacatctacttcccccgagtttccgaacttgggttaaataaagctaaccctactgtcccccacacccctgctacagagaggggatgagcagagtgtgtaacatgaaaaacgcttgtgaaaactggtgttaagagtgtggcactcgccaggcagtggtggagcacacctttaatctcagattggagccgggagagacggagagacagagagacagtcattcctgaaggacacttaaaaatatcaagacaccacccatgacacatggattgcagttttaatttctcccctcaagcagatcccaaatcatcttaaatccaagaaggagagtcttcctgtcctatcttaacatcttatgtacttctggaaactggacctagaccttctacagaagcctcaatgcctttcaataaccagtcttcaagaggtcccttagcgccccctgctggacagagatcccctgggcgcccctctttctcacagggtcccttcagttgagaggctctgtcctgggggccacagcactcaagctggttactaaggttctgacttatttatgtaaaccagggtgtgaaacgcttgggacagtctgcggggacttctactcaccacagtctttccctcgttttgagcatctcgatagtcagggttaagctgaaagacaaagcaaaactagtgttaattaaaaagttccagtgaagatggcttgagttcaatccctgcattcacctgcatgctcatgcacacacatgtacgcacacacacatacacacgcatgtatacacacacatgcccccccacacacatatacacacatgtgtacaaacacatgcccccacacacatatacacacatgtatacacacacacacacatgcccgtacacacacacatatacacgcatgtatacacacacatgcccacacacacatgcccccacacacacatatacacacatgcccacacacacatgcccccccacacacatatacacacatgtatacatacacatgcccacacacacatatacacacatgtatacacacacacacatgcccaaacacacacacatatacacgcatgtatacacacacatgcccccacacacaccacacacacgtgcatacacacatgctcacacacacatatacacgcatgtatacacacacacacccacacacatatgcccacacacacacatacacacatgtgtacacacacatgcccacacacacacatatacacgcatgtaatacacacacacgccctaacacacatgcccatacacacacacatatacatgtatgtatacacatacatgcccacacacacacatgctcacacacacatatacacgcatgtatacacacacacacacacacacacacatgcccacacatgcccccacacatacatgcccacacacacacacacatttacatgcatgtatacacatgcatgcccatacacacacacacatacacacacacacacacacacacacacacacgcccacacacacacacgtgtgcacatacacacatgcccacacacaggtgaacatgcttaagtaccaggcgagtgctttagtggacgctgacatggatgttggttttgtacttgtgtttgattttcactgaaatgtcattaaccctttatgattatctgtgttcattattccatctatatgtggagtaatacatacatggaatatatatatataacatatatatatatataatatatatatatataatccctctctcaagttgtttttgttagtattgtcactacagagaaggaaaaacacccaaataaactcacagcctcaaattctaccgctttgtcccttctccaaatacagcaacagccgtatttatcaaagttatcggcaaaggattacagaaaaagatattgctaaagaaggaagaaaatgacgggctagggaagtccctggatattttaatgctttgaaggaaaatacagcattatgttaaaaactgaattataaatctggcacaagggagagagagaactcttgtaattgatagagcatctctaaggggcaaacttgtgtcgagtggtattttagccaagagtcctgtccctgaccactgaccctgtggcctaggaaggaaaataagacataaatgtggtcagctataccatgatgcagatgtgatgggagctaggaggcagaaatgaatgacttgtaaataacacgggtcagaggagacagggagggaggagtctgtgatgcgctagcttattcaagaattgttcaagggtctgagcaatccttgaactcgggactgaattttaagtggcaggtaaaggagaaggaacacccgcaccctcgggacttatttgcagagtctctctgtgatacttttaagatatgtttggagagtttatccacttagcctcacaattctgcttctcaggaatactctcgattctacttcactgggcgcactgcatgagggacttcacgcggtcacacccacgccgtgtcagggtgagggcacatgtctgagggatggaatccacaccctgagtaactgctgcatctggctctcctgcctccaggaagcagggtgtgtgaaacaaaacagaagggttccacactgaataggcccttatgttggaaggaagatcaccctaggtctagggcctagaccacgaggattttaagctaaaaggaagatcactcaagacaaacaaggcttttaaatgaatgctataaagtcaatcttataggcttgcattcagcagcatctaagtatagaaactgcgacagaaagatatgcttgattctcaaatgctaaccctgaactaggagagaaatcactgcgttatggcaaaataacccaagctttaataatatttgctacacttttaaggcagtgagatgggcaagatcagacccatggtccacagagccatgggaacctcaaaaggagaagaacatagattactggcaatatcaaaaaacaccgtcttcgtcaactgttgaagacagttaaacacgactgcaacgtggaggagaggagtcagatcattgccaagagtcaacagtcccaatgccagctgcaaaatgccctcagtgtttcatccacacaacagtaagaaacagactgaaatcatagaagcccagaacacgtgctcatattcttgctttttttttttttttttggttgggggcgcggtggggaacacactcatgagtttgtgcacataagtgcaattctcattgagaccagaagagggcaccagatcctctggagacatgggcgctgagacccaacagaactgcagagcaataggtccacagtttggaagcaagcaccttaatgggctgaaccatccccccccccaaatttccctggttgttttggtttgagttgtttgtttgtttgtttgtttgttttggttggtgtttctttgtttgagaaaatgtctcctgaagtttaggctggcctcagactcactatacagtcgctggggggcggggtgagcttctgaacctcctgtgtccccctctgggagtgctgggacacaactgtgagatgccaagcctgacctctttgctagtattaagtttttaattaactgcacctaactgcaaagttaggaagtgcttagtgccatctggtggaagcttgtcctatctacaaacaaatatgctagttcattttcttcagagagagagagagagagagagagagagagtgtgtgtgtgtgtgtgtgtgtgtgtatgtgcacatgcacggtttttcaggcaccagtcaccttttgttgttgttgacacagtgtttgtcactggcttagaaccctcctagttgtctgctgggattacaagcacaagccaccatgcctggctctttttaggcatgtacccgaggacaaactcagggcctcttgctttcccgacaagcagcttacccagggaaaccccccccccaagccccgggtgagccactctctaaagatgctaccaaagccaggcatggcagagtgcacttgggagggggagacaggatatgaggaactcgaagccagcctctgaaacacagtgagttccagcccagacagaatgagaccctgtcttgcaaaaccaaaggtaatatggaaacttttttttgtttgtttgtttttcgagacagggtttctctatggctttggaggctgtcctggaactagctcttgtagaccaggctggtctcgaactcacagagatctgcctgcctctgccttccgagtgctgggattaaaggtgtgcgccatcaccgcctggcttggtaatatggaatctttaacaaataaaattatcttacattctctgatttgtcttgtttgggaaagaattatcacgtcatttgctttagtggttaatctccacggtgagaaaatgtaggaagcagcaggctggaagctgtggtggaatggctcttcccacatgatgggagatgattctaaggcccatgctagcctgttcctaagatgacccctgtcacaagggcataaaagatctaagtcacagcatcagtgagcccacagctgtgctgcccgaaatctatccccacactggccacctaactcatgtatgccccgtggaagggacttactgagagcccagtgacatgcctgtgtaaccacatgaagtccacgtgtctttattatctgatctgtaataaaatacatagatatagatttcaaccacagttttatggccctgcgtatttcctgaaaattaatccacactatgtaaaactgcatggccgggggtggggtggtgggtgagtggggggtcttctaaaccttggcttactctgtggtcttgcagagtaagacccaattacatcctccagtgctgccctaagtcgttatgttttctacattcagccaatcttttacagagatcctattcgtcagcggtttacaactgtgcatgctggctgcataattcactatagagtctccagcctacggaacacccggcttcccttgacttgtggccgcttctgttccgcacgaatcttatgctcaccacgattatctggataacttcatttccttgtgaaatgctggttaaaagagttgcactgagcactatgttcacaaataatgctgcagagtttctttctcttttctgctcttaaagttgccatctttaaacttgctgattttagtgtgcacacctagatgttggtaatttaaacatttactaaagccagaggtctcagatgtatctgatgggagcaatcaacacagtaagagccgatatatggctcggtgatgcactgtacagtcccccacagacggcaggcacttagcagacagcaaccacagttaacatctgtgcctctctagagctcttccacatggaggcattcagtaagtgactgtttcatgtcagactgaggtagagcaaggtttcttggcctctggatgctttgtgtttgggaccagataattctgtcagcagaggagaaaatggccctctgccttagccatccatgaggtctagcggcagatcccagcccccttcccaagtatgtcagccaaccatctccagatattgtccaaaccactgacaaattacacagtgcagtagtccaaaagcagcatccagcctgaacacagttgttacattattttttatctgtttaaggtttcttgtttatataacctctcagagaaaggttctatataaccttctctatgaaaggaaaccactgtatttgcagcagccatagttcctatccagtcagcaacctagtctctggtgagtgcaaattcagtgtgagtcactgtccacgctgtagagacaccgtccacactgtagagacacactgtccacactgtagagtcactgtccatgctgtagagacaccgtccacactgtacagagccaagtagtgtgacacactgttcacagtggagagctgggtagtgtgagagacacagtccacactgtagagacaccatctacactgtagagacactgtccacactgtagagacacactgttcacactgtagagacacactgtccacactgcagagacactgtccacactgtagagacacactgtccacactgcagagacactgtccacactgtagagacacactgtccacactgtagagacacactgtccacactgcagagacactgtccacactgtagagacacactgtccacactgcagagacactgtccacactgtagagacaccatccacactgacaggcatatacacaatgcacatacacaatgcacagatggatgaacaaacacataaacaactacacactagctggttgcaaggacattgatgctcgtggggacaggatgctgctctccgccttctctcctgactctccacagaggagaggcacttcaaatctcccagactttttgtgaacatggtgctgtacattcctgtcttcttttccagcacaacccctcagaacacagatgaccgcctgggtctcacacaagagaacttgggtccagagagaggctaaatgtctgcttaaagcctgacacacagggggccgtaggtatgacaatcctttgtaccattataggctctctttgcctaattagcactgtaaacccaaaagcagctccaggattatgtaatctcttttgaccaggattgtctaaaacacatccatgttttaatctataaatatgcctccccagggtgggaaagagagcacaaccctggccgtccaggtcccctgctgggcacttcccttccacgcaaaaggaggacaatcccctgtctgatttttaaatccattttatacagagcatagactggacttagggcttcccctcatcactgctgcttctcccggtgaagggcattcgagaactcggcccaccctcccttcagctgggctcccctgaagaactctgcatgaagccactcatggccacaccctggcctgtgcaacacacacacacatacacacacacacacacacacacacacacacacgcacgcacgcacgcacgcacgcacacctcaccccaaccccggtgaaacactgccctgacttcctggcacttatgattcaacccactgggttttctagttgtccccagcttctcaggctcccaggcttcttggaggttccagtctaaacacaccatcctctccaattcctggggctgatgagataaaaatctactgtcagccccatctcaatccccaaatttccaaatgcagagaaactgtagctgttaacactgtttcctgtctgttatgagcacctcagattaaccataataaactaggggtggggggcagagagatggctctaagagcatgcaactgcttttgcagaacacctaagctaactaattaatgagctgaatgactttcttcatcaatgtgttacctctgtcagtttctctgggtggtgatatgttatttatgatttattaaagcttaccacctgaggattcagaaagcaaagtcagcctcaagctatagagatcaggcagtggtggcacacatctttaatcccaggactcgagagacaaaggtggatgaatctctctgagttcaaggccacccagggctacaggagattgaatcagtctgaaagaataacaaagctcatgcctttaattctagcactaaggagatataaaagataggagcaggtcttcagtagtcagtcttaggattttccagccatgctgaggagagcctagccgtctgggattgcagtctgaggtttggtggagccaggatcacctttcagtctgaggtagagtaagagttagtggctggctgctttgcttttctgatcttcagcttgaagcttgaaccccaatatctgtttctgggtcttttatttatcatgctacactctggccaacctgcctggcctaatcagatagctccagtaaaagtgagagaccctgatgacatggatgtccttctgtatactacaaatatgtgttgcttttattggttgattaataaagctgttggggctaatagacaggcagaatacagccaggcaggaaatccaaacagagatagtgaaagaaggtggagtcaaagagatgccatgtagccacaggaggtaacatgccagagcatctccggagtaagccacagccacacacagattagtagatatggtttaattttataagagagagagctagccagtaataatcctaagccattggacaaacagtgagccgttatcttataagcagttgtgaggacctggtaggtggagagaaaccagtcaaatggtacccagacaggacaaagtctccagcaatatctgacacccaacgtgggcctctcaagtttccacatacaacctaaaaacaaagcttaaaacaaaaagtgggatctgtgatgtatatacagagctgaggaaagcttcctggttctgtctcccatgcagaccacggtgcccaatgacatagcattcaggcttgaacgcacagaaaactagaactgcaaccagcaagaacaatgccaagcaagaaatacaaacacatactaaacgtgcaggctataggtagttggcgaataacagagattactccagtagccgccctatcctgaggagcctaactcttgatctagtcttcaaccccaagatcctccaaacccatagaggatggaatcctgagcaaaaagacatgaggctcaccaatggtctccacacacaagccctcaaatgcacattcatcctacacacacacacacacacacacacacacacacacacacacgcaggaaacatacatgccttacacatacaaacacacaatagtgactcatagtctaactgtaagggttaatcgtagtggccaacttgatgagttctataatcagctgagagaagggtctgtgggtggccaaggggggttaatcctgagaaggctgaggtagaaagacttgaccactgtgggcggcaccattccctgagatgtatgaacaggagagaaccagctgagcggaagccctcatcagctctcgatggctggttcatgttctgttgccctgactttcacatgctggtctgtatcttattagccatgagccaaaataactcctttctcacctgaggtttttgtcagggtattttatcataacagcggggccagggagggacagaaaaacaccaagccagacatgacaggcaatattcaaatcacaggaatggtccctgacaatgcaatgactttcacagaaaggggttgcctggttcgttgtttcaggcagagacctaacaacactgtacccaacagtctcacctcggcagctaagtagttcccagtggcaagatgtttaaatctgaacaggctgttccactgtcctgcaccgccccggcacggatcgtggtgaaccacctacagagagggagagtttcagtgacaaaatggtatccacatggcagccaacaggtgtcatcagccagagtaacctgttgtgtatgccaacccatctaacatgtacccccgagagcacaatgtgggagaaaaacacaacttcccatcagtgagcataagacacgtcacacctcacttgagagagcccgtgcctcacacctgtaaacactgtcttactgcaaaaggcaatgtttccggtcaggggacagaggctcacacataaaatcccaggacttggtgtgatgaggcacaaggattacaaaaggttcaggatccctttgtgctgcacagtgagttccaggccagcctggactataaagtgagatcctgtctaatatgtaccatcattaggctgcagaactgggaaggtcttggcagaacacccacaccacaccaggcaccacggactgcatgaagcccttgccaggagctgcttaacaaccattcttccagcttgcttaggagacctggctgatctcaaacttgtgactgtcctgcctcagcctggtgaatagcatgcttagctatgcgtatctcgattttgatgcattcaaagaaaaaaatacccgctattttccgtggctataggttctgtgtggatgtacagattaagatacatgagactaggataatatttaattttattcagggagaagtcacttacatgagaacccgataacccacaagttagctccgaggatcaatgtcctgccgctctctgtgacccgaccagaaccaagagagagcacagcctgtcttggagcccaggccaaatcccacatgctcacgctcacatacgcacctgtgatcacgcccaaatgggtgtggtcagtgccacaggtgcgtctggtagctctcactacagatctgtctctgcctctgccagtcatgacgcagtgccacagaggcacatggcttccagtctgatcagcactgatgaattcacaatggaaatgttttctcttttcaaccccttgattaatttgttctgctttataatgggtgacatgttcctttcaaattggtcacagccacaaagagattatgtgttaattcacaaaaattattccatgttatagacatgccaccaatgttacccgtaacagcaaagccaacagcctgatgatctttatctttttatataaatatttagcaaacctcctcccccccaaaagtacatacctctatttcccagagtgctttagaactagtagctgacgttgctgactgacgcaaggtcgtccgaaggaaaatgtgctgttttttctcgtagtcatcacaggtcagaaacttctcttgttcggcatgaaacagtctcacgacatcaccctggagaaacaggtgaggaaatggtaaccatccagtggtcaccaccaggaaactgggggtcctgcagttcctttctgacctgggcactctgggctgcagggccttcgcctatccttgaaggctctgagcacatgtcagattactggcgcttgagaataaaggtttgtatggagggcttactcacccctttcaacacatcctcacgataggagctgaatttcatgaataaagtgattttccagctagtgttgcaattgacagcattcacctattggtggagacaaatgttaaagacataagacagtagactctgtgttctgtaccaaaaatcaccattccaaacaggagaagaaaaaagacaactatggacagcaaagtgtgggcctcaataaaaaacatcttcaaagaaccattcaagacaggcagtacctacagacgcccaagggtgctaacactgccagcatggtgctcaagagaatcaagaccttcctctgtcctactctcttcctccctccccctagagaaaatcagcaccccttcctctcccacctggactcacctctttgcagcctgggttgtccaggagttccacattgctggcatgcaggggctgcccagcgttcaccggcatcagaacaactttatctcctacgacgatctgggaatcagaaacacaccctgatgctctgaggctggaaacaccccagcagtcctcaccagcagcctgcctcccggtcctgtcattctacagattgtgacttgactcttctccctgagaagcatgttcagtgttccatgcctgccaaaccctagtccccgttagtctccatgtcacctggggcttctcagaggtcagaatcaggcgattttcttcccaaaagtccttgcggctgacacagtgaaggcagctaccacgatgttccttctagccaagcttcagaatctcaccagggtagcagagaacacatccctccatgctccctccccaccgaaaggcggtgctcccactccaccgaaaggctgtgggtctgcttaactaatcatcccgaatctcagaattatgaagcatctgacctctgggttcaggaaatacaaagcagggcacaaccttggaaaaatctatgctttgtcaggcctggagctttcggttcccttttacttgaaatgtctaaaaccaaaactgtaggagcctgtgtttcttttaaaataagaattatcagggttccaggggaaagtactaaaaaaatctaagtctgtatttatagtcatctgtgtgataagagcaatgtctattttacatgcaaatatctttatatctaattagacttgagggaattgaatttaccttttcttaatggcaataacagtgtgattttagtaactggagagacttgtgctagttcttttttgtttgtttttgcttttcttttttaagatttattttgtgtgtgtgtgtgtgtgtgtgtgtgtgtgtgtgtgtgtgtgtgtgtgttttctatctgtatattcacctttatgccaaaagaggtcatcagatcacactatagatggttgtgagccaccatgtggttgctgggaattgaactcaggacctctggaagagcagccagtgctcttaaccattgagccgtctctccagccacccttaatttctttagaagacggttttgtggcatctactttcccagctgtggggctttcccactctgaagcaaaatcaaaaaccttccctttgcatgtttcataccaattacatgttagaacaattaaagattgctttgttacataaatgagaaaacaattgggacttgggacatctccatgtaccttaaccaaaacacacgctcacattttcagtgtcccatgaccctaaatgtgtactattgaggagctgtgttgccgcacgctgcatctagagacctatctgtgtccaagaagcctcaagttcagtaacccagcgcaggaaggtgcccttggctttgtgggatgagtgcctgctgtttgtaggacaggcctgtagacctcatcccaccttccaaacacagatgccagcaaacactcatttacagaaaataaagtatatcattttttagatagcactgaagagggactagggaaaacgtgtgtataagaaacagtccataatctcggggaattcgcattactagatgtgttggaattattctcagaagagtgaggcttcaggcctgacggaccctaagaaactctatttgatgcataaccagagggcgaggccctttgcttttacatcttataatcccaaagacttctgttgggtctatgcagtgaccatgtcacgctgcagatgggatttcactgataacgatgccacctgcagctggctgtccctgctctgagtgtcatttgggacagtaagaggaacctcacagtgggaatcagaaaacaccaatgccctatctctgcctctgctacaaatgccaggcttgtcattttgtgaaatcacaaaatctgcctgccagagttcctcaccgtgagttagaattttctactgacttcaagaattctacctctttatgcttctaaatctacatcagggcaaaggacccttgtcttctcaggtcaagactaaaaaggaaaagagttaaatgctcaaacatgaagaggacacgtggaaatgaaatacccatgttttcggctcaccagtgtcctcggtggtttttctagtaacttagcagcagtgaaggactttctatacagctgacagtgaagggacctgtgaacccgtttcccccaaaccatgcatcctacctagtgcaccttcgtgcacttagctcaaggaacagcgtgcactccaggccgccatctgcatcattctccacttgagccccgaggacttcttgttggttacacacaacctaagtctctccttcgctcattgctaaataccaaactgcaattttaaaattcctctgaacattgcaatttcctctccatttaagatacttacgcagaaactcagtcataattaaaccactcaaagagacagcattggcaaaactgccttcaataaactacagtctgatgttttaaaacgctgcctgttcctagccaagaaaacaagagttgcatacaagtccgtgcaaggctgacacaaggctgtgggcatgccagccttcctcggcaacgttcatcacacacaaagccacatagaggtgaacgaacacagtgacggtttcagcaagaaggtggaagactgtggcagcgggactttgtggagtgcatccagaaaagaacaacttaacgcactgtggggcggccacaaagacaaggtttgtttctgctgaaactaattgtctaaagtagttgttacattcaactctctcctgatactatcaagtggcttgcaagcaaggagagaaagtcaaaggaggaatcagcagagggaaccatgaaattcacagcaacccgaaggcagagagaggctcatttcaccatgtcatcacactcttttagtttgagcgtagttaggatttgtttgatttgacgtttggttttcatgaaccacctatagaggagttgggggttggggacaccattacaagagaagtggatagttcccaaactacattttagcccttgaatgattgagagttgagtgtaattaactacaaatccagtgtaaggacgcgccatgctgccagcacacatcacttcatatcaaaagtaagcagtggaagggagaactagtttcccaagaatccagtccatccctgcatgccatgcagcacagaccttacctaaggaaagcatcaccagaaaaattactaacccaattaaatcatggcgcttgtgtcctgtagaattgaatttgtactttaaaattcactgagggaaaaaaagagattctctataaaaagaagacaattctcacataagaaatacctccaaacacactaaagatgcaacccaagtactgattgtgaaacatggcaggagaattacattttcacttcagtcagaattcatatgagcttttccacacggcaagtattgatcacctggcatttgtgtggagttctacttataaacctgtctttactgagcatcttccaggagctaaggactaccacaaaaatgtcaaattgttaaccaggtgtggcaatgcacaactagaatcccagcagtcagtaggctgatgctgaggcaggaggaccaataccagtttgaggtcagcctatgctatattacaagtcaggcaagaatatagtgagaagcatctccataaatagagaagatgaggagccatctccataaatagagaagatgaggagccatctccataaatagagaagatgaggagccatctccataaatagagaagatgaggcaatgattcctatggaattatctcactttttttctcttccacaaaatagcagaaaagatctaagccagtggttcccaacctgtggctcacaacccctttggagcttgaatgaccctttcacagaggtcacctaagaccatctcataggaaaacacaggtgtttgcattatgattcataacagtagcaaaattacagttatggagcaacaacgaaaatgattttatggttggggtcaccacaacatgaggaacttattaaagggtcacagcattaggaaggttgagaaccactgatctaagctctggcgacatcacagccatttatacaccccagtttattgtcattgacagtgggcagatgtcacagtccctcaaaccctgcacactgtgacaacactgtaagaagttgtctgtgaagatactgaacagaacattgccatggctctctgctaacttgattaactgtcctgtgatttctgagcgtggcctatattgtaaacaaatgcacttaacctagtaaaacaatgctaacgccaaacgtgttagaaagtgcaatgaatgacacatatatgtaaaaccgccataatgcagcccatcattccctatgctaacttaagtagtttagagttaactggctgaagactgtactttcggagttctctagcacaccgtgggttgtttgcttctcccttggttttgcccacacatacattatcaccctcgcttctcagcttccagaagggatggatgtagaaccaggacccttcgttccctgcggcatccaaggacacgcgcatggcattcttctccagcagagcaggcaacctcttgttgacagtcaggtacttgttgctttttatatgcagtagctgcagaggaaagatgagtgttagagcctgtatctgtggtctcctcgggtagctgcattcataaatccacacaccacaactcatgctggaaactaaacacgggagctactttaaggctcagcaacctccaacttgccaacctgcctgcctgtctcctcctcgtctccaccccaagttctgcttcaagggtgatggtgactgtgcgtggaagataccccaggggacactgaagacaccttcatccactgagaaatagcagactaaaatcaggctttccaaaaaagacccggaagctgcctgaacctcacccatttccaatactcttacagccacacaagcagaatctgctgaagaaaatcagaggcctacgccacaccctaagcaccctgcccatcgacagcactaactcacactggtcctcacctctcccttccccatggacaccatagacagtcttcccaaaatataaccttattgggtagaactacaaaggcaaacttcccatctagtttcaaaatcagccaaaagagaagggacattttagtacccataagatgaggcagaagttatttcaaagtaaaatggcaattttttaattgaaaaaacaagaattatctttttgtaaaactccaggccctacccttggttcttattgtactaatgaaggcatgaaaaaccatgggtctgggaactagctcaactggtcaagtgctgccttacaagcctgagggcccaagttcaatcccccaagttaaaaaatcaaaaccgaaagcaggatgaggaggcacacacttgtaaccccagcactcgggaagtgtatccctgggctccctggcagcctgcctagctggatccacaagtccaggctgtgagagacctagtctccaaaaacaccatggggcagctcctaagaacaacacctgagatgaggctgacttcaggcttacacacacacacacacacacacacacacacatcacacacacacacacacacacacacacaaacacacgcatgcacacacacgtatgcacacagacatgcacatgcacacacatgtatgcacacagacatgcacatgcatgcatgcacacacatgcacacacatgcatacatatgcatacatgcacacacgtatgcacagacatgcatatgtatgcacgcacatgcatacacacacatgcacacatatgcatacatgcacacatgcatacatacccaggcatacacacacataaacacatgcacacacatgcatacctgcacacacacaccctcaagccttagtatgtacctccaggatccatgtcaaagcacagaacgcagcccctaagtaagacaagcattgtacttgaagtacttgacaaggagcttaaatgagtcaccaaagctcagtgaagagacatcatctctggaagtctacttaggggatgtgcagtcccaccaagccgaaagtcacgccctccaccctgtcctgtggggaacagctttgccctgccctctggcacactgccatttgtccatgacagaacaccaggagacattattctttaatgtggccttgttaagtgcctcattgtggtgattactgtaaggaacctgtgcagggtggtgtttaccattttaaacagtgtcttctttatgagcactcaagggaaacattttcctgatctcacttctgggaatgaatgtgcttccagtccccagatgggctctatgctacagacctccactaccggggctctagcagggtccctcctgtggccaagcagcagcagcagtgccttgagctggggtcacagtgacagcaatgccttgggctggggtcacagtgacagcaatgccttgggctggggtcacagtgacagcaatgccttgggctggggtcacagtgacagcaatgccttgggctggggtcacagtgacagcaatgccttgggctggggtcacagtgacagcaatgccttgggctggggtcacagtgacagcaatgccttgggctggggtcacagtgacagcaatgctttgggctggggtcacagtgacagcaatgctttgggctggggtcacagtgacagcaatgctttgggctggggtcacagtgacagcaatgctttgggctggggtcacagtgacagcaatgctttgggctggggtcacagtgacagcaatgctttgggctggggtcacagtgacagcaatgctttgggctggggtcacagtgacagcaatgctttgggctggggtcacagtgacagcaatgctttgggctggggtcacagtgacagcaatgctttgggctggggtcacagtgacagcaatgctttgggctggggtcacagtgacagcaatgctttgggctggggtcacagtgacagcaatgctttgggctggggtcacagtgacagcaatgctttgggctggggtcacagtgacagcaatgctttgggctggggtcacagtgacagcaatgctttgggctggggtcacagtgacagcaatgctttgggctggggtcacagtgacagcaatgctttgggctggggtcacagtgacagcagtgtcttgggctggggtcacagtgacagcagtgccttgggctggggtcacagtgacagcggtgtcttggctgggttttactgagctttgtaagcaagcctcattttttacttcacctcgtccagccaccattattttcccttccacccagctgcctcccttggcaactggtgctttatctaccaatgtgctgtgtgtttcttggaaaaggcctcacattcttctttggaacaaggtggggcacttgctagcaaacaaacaaacaaaagaagcctaaaagatctgaatgaagggggggtgcagttgagataagtcaatgtgcaccctgacaatgaggactggaagccaaagcaatattgcctgttaaataaatgtacaatacgaaaactttccccttgaccccgggaaatcatcaagcatcagcccatccacctaaaggactatgtcttctgggccttacaaaccctcctgcacagtcttacctttggtaacttaagctcccaccaagagatcagttttccgagtgcctgcacggatcgcctatgttcgggacttgcaggccagcgccattgggcctggcacaagatgtattcaatacatacatgatatgatgcatgttcactgaaagcctcagactaatcatcatcccctccaaagaagaacacggtatcacaaatgcttcatacagcttgacatgtgggtagtttgacggctcacccataaaggacttccctctctgatgacaaaatgaagacttacttgtataacgttgctgtatttcacgatttctcccaacagtttcttgttctccgactcattctgtttctgctccagctcagcagcatgctgcaagaggacgaccaagtattcagtgtggaagcatagcaagcagagacttagtaacaagaataaagcagacaggctgtgttattagagagctggatttcagacggtttctctgtgtagccctggctgtcccggaacttactctgtaggctcagctagactcaagctcagagacctgcctgcctctgcctgcatagtgctggggttaatgcacataccaccatgtccagcaaggaagttttttgtaattgggggtacatttacactaggctcccagatctcccccaagccaccccaccccaagtgtggcagcaactttacaatctatgctgaatacagccaaacctgtcttggaccatttgtttctatactgcaaatttcagttaagtagaaggttctgtggaactagaaacttctctacagtatgatgtgaaactgttagaaaagcaggtaaattaaaacctcaaaatatagctttcagtcctgagagtacctaggatttaaatgatacaaaacttagtattatcaaattcagacttagtaaaactatatatatatatatatatattattttttctctatagactgttaggggggaaaaagcagtcaaactatctttatatatatatatattattttttctctatagactgttaggggggaaaaagtactataaagggtaaaatataattagatttaacagtcagggtttttttaattcctttttggtttggtgagaagttgagaattagcccggcacaccttaaaaaataacagtggggatgtgttgcccacatgccaggaaataagtaggtacgccctacaacggaaaactacttacctctgcactctgcctgagctctaactgaaatctctacacaatggtgaaatcagcaaggcgagcggcccggtgcctgcttgttattgttgctctcgggccagcctcaggggcgagcctcggagaaagagggcagcgacttacctgaagcttcttcagcagggcagcctctgtgtggtttccttgcttcgcctgcttggctttccaatattgcttctgggcagagtatcgattcatggggcagaccttgaaaaggcagtctgagaaacaaacggagcagtgtgactaaggctctgggtactttctagacaccctttgtaagcctagtttgagacatgaatatcttttagtatttggggacagtcttaatgcactctataacatccttttcaaatacctacttaaaacagtttcattaaactgttttaaactgttcattaaactgtttcattaaaacagatgcttcttcattagtgttttgtgaaacattctagctagtgtaattcatgaggaagtcaatgacgtgtctggagaaggcaattcttattgtagttggctttggatttttgagacggggtctcatgtagcccaggctgacctccatcttactaggtagacaagatggtcttgatttccgggccttcctgtctttcccttgacagtactagggcagcaggcacaagccaccacatgttgtggaatggttaaccatttaaagatgtgttacttttgtttatgctgtagaatattactgtaactatgtgaaggtgtgttacatttgtttatgctgcgtttgtttaatgatgtaagctgggcgttggtggcaagcacctttaatcccagcactcaggaggcagaggcaggcagatctcggtaagttcgaggccagcctggtctacagagcgagtgccaggacaggctccaaaagctacacagagaaaccctgtctcaaaaannnnnnnnnnnnnnnnnnnnnnnnnnnnnnnnnnnnnnntgtgttacttttatttatgttgcatttgtttaattgaaaagatgtgtagttgtttcactgtgcctgcctaaggttcctaattggtctaataaggagctgaacagcaaataggtaggcagagaaaggtaggcagggatgacaggcagggagaataaataggggaaatctaggcttgagaagaccaaaagagaaggggaaaggaagatagaatgagggagagagagacactcctgggaccagaagccaggcacaggaagcggcgaaagaaagaaacacaggggcgttggtggcgcatgcctttaatcccagcactcaggaggcagaggcaggtggatctctgtgagttcgaggccagcccggtctccagagctagtgccaggacaggctccaaagccacagagaaaccctgtctcgaaagaccaaaaaaaaaaaaagaaagaaagaaagaaacacagaaagaaagaaagaaagaaagaaagaaagaaagaaagaaagaaagaaagaaagaaagaaagaaagagggaaaaaaaaaaagccctagataaacagatcaaagtaagatctaagataaggccaagcattcataactaagaataagtccccatgtcatgatttgggagctgatttgtggcccaaaagaaagcttggtacaaccatgcctggcttgatgaggtatttaattgtcatgagtcccaacactcaggaggcagagacagttagatggtgagttcaaggccagcctggactactccacctcaaaacaaaacaaacaaaaaagatgctgtatctgcccctgtattgcttgtccatgttcagtatatttgatgcaagaaataaccacatgaccattgcagccatccattcggatcccctgggctccaaatacctggggtgaacatggtgaaaatctgagagacagtataataggaaggggaaaaaaatcaaacaaaacaaaagccaaaactgtggtcctgatttccaaatacctaaatctgtaggctggagaccacaatcataggcaaccatggtagtgatgtctccaaaacggaagagctcagcagtgaccccttcccagtggnnnnnnnnnnnnnnnnnnnnnnnnnnnnnnnnnnnnnnnnnnnnnnnnnnnnnnnnagtgatctcaacacaaaacacgggtcaactcccaagggctgagggtcccggatgctcctcctgattcagtgataaaattctcaatagcagctgtcacaccagccatggtcagagggaaggaagcgatggctgcctgctgcccagcctcctgcctccacttacatggccccggatcccagccagggactctgctgcccaccccaatgcagacatgtccagtggtccaactccctctagagtctgacaccctgacaacacacatgacagagcaataaacgaggggccggaaagatggctcagtggcagagtaactcagccagggatggctcaaattctggggacccaacaccctcttctgaccttcttgggcaacaggcatgcacacacatacataaaggccaagggctcatatacaataaaaaaattctgatggtcatggtgacacacaccttctttaatcccagcacttgggaggcacgggcaggcagatctctgtgagttcaaggtcagcctggtttacatagtgagttccaggacagcctgggctatgtagtaagactctgtcacaaataaataaataaataaataaataaataaataaataaataaataaataaactaaaacaaaacatccttaaaaaaaaacttactgtgttttaacaaatgtgctactactatttagagacagtctcgctttaagtgtatatcaaaaaaaaaataaaattcagtagagtcaaatatccattcagccacagtcttaactgttctaatggtataaaatgatcaagggctgtggtggtttgagtaagaatgctaccacaggctcatgtatttgaatgtttggtcatcagggagtggttttacttagcagagattaggaattgtgggccttgttgaaggaagagtgtcacagagggtgggctttagggtttcaaatgctcaagccaggcccagagtctctctaactgtgtctgtctctgtctctgtctctgtgtctctgtctctgtctctctctctctctctctctctctctctctctctttctctccctctctgcctgtgtgccatcttgcttcccaccataaggataatgaactaaacctctgagccataagccagccccaaccaaaagctttcctttatatgaattgccacggtcatggtgtctcttcatagcaacagaaccctaagacaaggagtatgactagcatgtttaagaaattaaaaataaaacaggagacataatgaccttataattatatacatagattctattcactggttggttggttggttggttggtttggacactgtggaagccagagaataacttgtagaagttggttctctccttctaccttgtcagttccaggaataaagcacatgtcatgatacagcagagagagccctttacctactaagtcatcttgtttggaccacaaagtctatcaattgccccacttcctttattttaaggtttatttgttaattatgaatacagtgttctttctgcatgtatccctgcaggccagaagagggcaccagatcacatcacagatggttgtgagctaccatgtgattgctgggaattgaactcaggacctctggaagaacagccggtgctcttaacccctgagccgtctctccagcccaatcgttccactttaataaccagaaaagcaatccataatttcaaactttaaaaataccaatatgaagctgaagagatgggttggtggttaaaagacctcctgctcttccagaggacccaagtttggtttccagtacccacagtgaacaactcacaaccaaccacctgtaactccagttccaagtgatccgatgccctcttttggctttcacaggtactgcatgcacatgtgcacatgcacacacacacacacacacacacacacacacacaaacacacacacacacacctgcaccacatacacacacacacacaaacacacacagacacacacagacacacatacacaaacatacacacacacacacacacaaatacatctaaataaaaatgattttaaaacattgtctcaaaaaaactaaataaataaaataaataaatcaaaactaaataaattcctaaaatactactatagatcaacatttgttcattgggcttggcagtgctgaggattgaactcacggccttgcacatgctaagtaagcgctaagctataaatccactaagatttatcactaagatataaccctatcctgagagtgaatagtttatatgaggcagaaaatggcaccttcaaaatgttaacccaggcttgaagaccatcacggctgcaatgtgactcagaagtacctggcacatgtctgtgaagaccaaaggctgccgttgagacatgttgtccttggcagcattatcctacaaggctcagaaattatttcctacatattagcaataacaaagagagttatacaaagttttcgaagcataaatactaaagttgtttgttcacaagcaagcatgaaaggacatctgtgagctaatgccgtagattattttgacaaatatgaggccagtaacgaaactacattgccttggtgcagcaaaaacacaagttgatgttcatgcataacacagccctgtgacctgtgggccattctcatcaactcattcacttgtggaaagagaagcagtaggggccctcactgttgctacagattcctatcatagttcatcaggaaggggtcttttgacacagaaatatatgttgtggtgaattttagaataccccaatgctgctcctttgaaatgacatctttggatagctaggacaacatctgtacagacagcattgaggcctgagtatgtggctgaatgggtgaggaaataccagacatcagacggtgcttattgtaatcccgccaggagtcctgcctgtgccttgggtgttatgactcagcccccaccctcaggaagctcactgtggacttaaagtttcccatgggggctctggaggagcataaagactgctccttggaactcttccaacgggtgacttctcattttatgtcagtaaatatgcatgagaattaggactgcaagacagtctggactgacggaacataggtcaaacaccttctgtggaaaagttgttattgggatggagcttaggtgtgactggttttctctcactgacttctttagagcatgttagaaaatatatactatccttggactggtcagatatgttgtccaattctaaatttactgcctagcaagagtgttactaatgcccccccccacctaattcacaggggtgctgagatagacaaaaagataatctaggtggaatctctctgtgagctttaaggcctgtcataagtgtgaggcagtatgagtgatgttgcctctttctcagtcagagccccatgaagacagaggggtgactaagccctcagcaagccacaaaaaaccagcaatcttaagttcagccggaacacaccccaagagtgtgcaattaacaacgtgtccaccctttcggtggaagatggccctgcgtgagcttgtataaaattcttgaaggctctggaacgcagcagcattgaacagaggaaacccttgctgctgccttgtaagtcaaacacgcaggttctgtcacagtaccagcgagggtggcgcctcagacaggccctcttcttgttcacagaattcacctaattcagactcacccaaacctatccagacctttccaaacctgctgttaaagttagctctccagagacctgagggcaacacacctataatgcaagcactcacgtagaggactgccatgagtctgaggctacagtgtgagacccaaacatccacagatacacactgaactgaactctggaacttgttgcagagagggaggaatgaagatcaaaggggtcggtaccaggcttgtgaaacccacagaaacagctggcctgaacaagggggagcacatggaccccagactgctgtctgggaggccagcacaggactgatccagacccctgaacatggatgtcaacgaggaggcctctgcactctagggggcccctggtagtggatcagtatttttccctggtgtaagaagggactttgagagcccagcccacgtgaagggatgcactctccgcctggacacatgggggagggcctaggaccagccaaggttgatgtggtggactttggggagccccatccaggggccctaccctgcctggggagtggagaaaactaaagttagctcctcaaattcctgcatgtgttcattctctcaacttgaaactagtacagaaattagttcagagccaatttttaactagacagccacctcctcatcatctcaaggctcaatgaattaaatttttttaaaaaagaggaaaaaagtttgtatcatagaataatcatgaaaagcacaaataaaaggaagtgatttgagtttaattcttttacaagcttatccttcgccgaggaggccaataatctgcaggaacatggtgtattagggtatgtcagttatccagcaaggcacatgttcaccaggcagtgtccggaaaaccaccgctcaacatcaggacctcttctctaatcgccttgggacagcggttctcaacctgtgggcgtgaccccttttggggagggggtcacatcagataccctgtgcaccaggtgtttctattatggttcctaacagtagcaaatcacagctatgagggagcaatgaaactaattttatgaagggggcgggggatcaccagaacacacggaactgtattacaggattgcagagccaaggctgagctttggaaggaagtgaagccaccagaggtacttgcttcagcctcatttcaaacgtgtgtggagggatgacccttgaaacctcttaatggtgtatagcagaaactccacacgggataacaccaagctccagaaacacacactcacactcacacacacacacacgaagaaacccagcgggaaaacaaccaacacctccacttcctgtagccactgactcaagtttgaagtgctttgcttcgtacccctaaaatatttgcccctgaggctgtttctgtcccccagaaaccaccttcagcactctagtcaaggccagtgtgtaattctcagtgcatcttgnnnnnnnnnnnnnnnnnnnnnngtagggaaggcaggcttcctcatgcgtcctccttagaggtgtcttaagacttaagtgcagtagaacgcattaacccatcagcaagcctgtctttcagcaagtcggacgtccaccttgtagaatgacctcatgccaactagggaacgttgctgccagagacttcactccctgcttggggaggaaggtgtgtaaggtaaggttctgggaatgctctcctctttggaaggggacacagccgagtccagtggccttgcccatgaggaatgaagttgttagagcacttccttgggaagcaggcaggaagacaagtggccagtccacagcagcgactcatctctgacctggccgtggggtagtctgagctggtctgcaacagagctgtatgtaacttggcttttacttcagtctaaggaactcgttttaaaatgcactgtctgtatcagactctcaatgttgagaagttatcagagagagtatgttcttttggaaatatcaaaccaaatctctcccttggacctgcctaaggaggctgcaaaggtcaggaggaatggacggcctgcattaagaaacacgaaaagttcatcacaacacatcttaggccagcacccatgaaaacagcaatctccttcctccatcacagagcccttactgcggaagggaagagaaaccgtcttccatagctccgggctgtgcaatgctaaagtgttaagcctcaaaggggactcagataaaatccagccttctgttctctgagataaaggagcaaaacctcagagcctgagttgtcaaggttcttcctgataaaactctccagattagaacacattacacgtatggacaagagcaaccacacacagtacctagagtgccctggcaaatgactgcttatatcaggcaactttctgttccattaccgtgacagaatacctgagataatcaagttaatgataagtacaggtcctgctgcctttggatctgtggtgccacagtaaatcatggtggcaacatgtgatggagggaaccacttacctcacagaaagcaagcaaagagaagggcggggagggcgggaagccgcccttccatggaagaccagcacctaactttttggctaggccccaccatagagccttctctacctcacagtagagccacagtctggggaccaagctttccatacatgggtcctggtttgtggaggtggcattccagatccaaactacagcactgaccttgacagtaaagacattcctgtcacatttgttccctcaacacagttgactatcggcaaacactgtgtaaacagtaaaaagtgctacaaactggcaacaaacagcgttttctcttctctcttgagagtcagtcagggttacagaaatgaaaacgcagttcttaaacccacaaaggggctaaggagttgatctggaatttgaaccagggcctccaagcccaattcactatgcagctatgagtcaaagcaattactcacacacgtttttttcatgttgaagcaaagtgcctcacgtcaaacgttgttcttaactctacatgtgcatcttgaggtcactcagaaccagttgaaaccagcttccaccacaaacctcgtgtccccaaacagagtccttcggaattctgcacttaaactttccttcatcatcacagaaagatccaggtcctagtgtcaccacaatagatgtgactgttcaattaacagcaaagccttaatgtgaccagcaagtataaacagtggaaaaatactggccagacagcaaggaatggctcgcttctcatccatcctactaaagccgtgcacacagacaacttctagataaaaactgtggagtatgttcacatttatacacacgtatgttcaatagatatcatacatcaaaagaaactgatgaatgtttttagggggattttgttaatgtactaaaataagggtaaatacatcaatgagaatgttacaaaatcgtaatcttcttgagattaatttcctggttcaaatgttaatgagtaaatacttagaaacaaagcttcatttggataagaagagaaatagattataaataatttatattctggttaaggtttggattctaacattcaatagaccatttcaatggataagcagcatttgaaattgggggaaaaaacacaatgaataatgtttttcacttagctttcccactatagatatgacatgttcacaatggtgatttataaaaaaatgtgtaatggatgaattgatttcaggaatcaaatacacatctctaaatttcattaaacaaacccaagagccaaaagagaagaaaggaaacaatttatatgcatgcatccatacgtgatacttatataattgtgtgtggggtgtgtgtgtgtgtgtgtgtgtgtgtgtgtgtgtgtactgtgtgtgtgtggtgtgtggtgtgtggggtgtgtgtggtgtgtgtgtatgtgtggtgtgtgtgtgtgtgtgtgtgctgtgtgtgtgtggtgtgtggtgtgtggggtgtgtgtggtgtgtgtgtatgtgtggtgtgtgtgtgtgtgtgtgtgctgtgtgtgtgtggtgtgtggtgtgtggtgtgtgtgtgtggtgtgtgtgtgtgtgtggtgtgtggtatgtggggtgtgtgtggtgtgtgtgtatgtgtggtgtgtgtgtgtgtgtgtgtgtgtgtgtgtgtgtgtgtgtggtgtgtgtgtgtgtatgtgtgcatgtgtcgtctatggcaaaatcaaacaatccattccatcctaatatcccctctgaatgggatggaaaagatccgactgagtggaaccaaatggagcaggaagaacagggaaaggggagcaggagcaccactgcaccactcttgagaaatgcatccatgtactgtaacgtgtacacacatgcattgcgcagggttacacacatgtgtacacacatgcattgcgcagggttacaatacaaaacacatttacttctgaaagtcgcaatagtgttcagtgggactggagcgattgctcagtggttatgagtgattgctgctcttgcagaggactaggttcaggtcccaacacctacagaacagctcacaaccatctgtgcctccagttctagaagactcgatgccctcttctgacctctgtgggcactgtacacgcatggtacacacacacatacatgcacacttcatatgcataaagataaaaataaacctttaaatgcctcctcctcctctgctcgttctgcctgtcctttcctacagcagtgtccaccagctaccttcactcgtcagcaagtctgcgtatgagtctgcgtttagcacctgtctgcaatgtgcaggcagtcagaacctttttgcaaacagaaggctgccacgaagcttccgaaggagcagtcatcagaagttctccttgctcttctgtgacattttagagcacaacagtagaactagttgacaatctctgttcttgttttacctccaaagcctggcacccaggaagtgaagagggttgggaatgaggatcccagagaggcaccctttagaccacccatgatgacagaaatatgcagaatagttgctcatcaagttttctgacacataaaaatctatacttccttgtactttcaccaacagtcaagctttacaaaaacataaaaaccacagtaaggaaacaaaacccaagcactcaggtacaacacagggggcacagaggacgggtacaaatcactagttcttaaaatacaaatgtaacataatcagagtgactctgtgcttggacgtggctcatctagggtcctagcactcttgtggggaacttggccaggctcacaggtggtgacaccttcaaggggtggagtttagtggaaggcaattaggtcattggggatgcttcctcaaaaggagatgaaggtcgctcttgtggaaccccctaccctctactgcccgtctcgctataaaatctctcatcgtcatcacatgatgtagtaaatggagtcctcaacacagccaggctgtaccacgtccttagacctcaaatagtgggagctaaataagcccccttttttataagtttgcagcctgaggtattttgtcagaacaacagaaaattgatacagtgattatatagccctgtatacccaagactccatggacaagcttaagaaattactgacttattccagctgcctgggcctgatagtaaatcatcccccgttcctttctcaagtgatctagtttgaattacacatatacaatcaccctaatacctcatagacacagtagtggagttgctgaaaagccggggccacaatttggggctggtcgatgaatgaatggtccctcacagaaggaaaaggaccaccactgtaggagtcacactttaagtgacttcctaacaaaggagcttgtacctggggctgcaggcatcgtaacacaagcacaacagccgtggtagctggggaacttcagtaaaaacttgaaaatgttgcattctagaaaatggaaaggtatataaacacatttcacagaaatgagcagctgccagtctaaagcagggaggggcgatttatttccctatagtgattgatccaggatcaaagcaaagcttagttcagcatcagggaaccttgccaacaactgggggacaaagccgaaactgtgaattactcacaggcaggcaaacttattcctcaagctgggacaagcaacgagcagaagggatctgtgtcggaaagaggtctgaacacttcctggttttcaggaggttggcacgaagaggacagggctcgcccctgcacccacagagtccccaccactcgcctgtctctgttgtggtcactaaactgcagtttgctttgacttgccaacattctggaaccaggaaggcccagccctggagtctcctgcgttttctaccactgagtgtgtgttggtatgaggttaaaacactcacagttcgggcaatgtcactactcattattattagcccaacttgccttgcagatgaacaaatacagttgtgtttgtgtcctggggtttctaaagcagggtgccatgagaccgcgcaccacactcataaaataagggaaggcaagaagcattttaaacgatgtttaaaacatgtgtaaatgattttaaaacatccagaagagacgaagagataaccaagttcagttcctagcatgtacatcaggtggctcacaaccatctgtaacaccagctccatggcctccaacacctctggcctccaacggtgcctgaactcgcatgcacacacccacatgcagacacacacacctataaataattaaaaataataaaaacaaatatcaaaaaagctgctgcttgggggtggcttgtcaggtaaaggcacttgcctcaggcctgatggcctaagcccgcttggcagaaagggagaaccaactctcacaagctgtcttgaccgccacacacatgctgtgcatatatattcccttttagcacacatacacacacacacacacagagagagagagagagagagagagaaatgtaataagaaactttgagatatccagtacccgtggcctttagggaaatgtgactgaaagcacatcagaatggttaaaattaaaacgaatgacagctttggagggtgggaggaacggtcaagactgcgcctccccaacacccagcagcttctacatggttcacggataaacactcgatagattatttaacccatggaaatttctttagcagacgtcaacgctgctgtcattttgcagatcatgagaccctgtttaaagattagagcctgacccagagccagaaagtggcactgctaagactcgaacccaaacaggcagcctcaccagctgtgtccttgtgagcaggagatgatgcaaagactgcgtccagctgttctgtacgttcgggaaggtaatggcacatggatggaaggaggaannnnnnnnnnnnnnnnnnnnnnnnnnnnnnnnnnnnnnnnnnngtgctcactgctcactgaatttaccaacattccttggagtaaacacttaaaatgagtgaatagtaaataaattactggtttgtttgttgttttaattttttaatggccatagctgtacctgaccctggagtgcctgctctctatggatcagctgcttctcaaacgctcctaagacagaaaccatgctttcaaagccacgcagctttcctctgcctgttttgtttgtggttgcctggtaagcaggctgggaacactggggcagttgcctgctgcctggcaggatctagagatctccctgtacagggtagctttccaaagtatttgatggctggctgataagacactccctgggcgcagcaggtaaatctggctaagtttcctgagataaactttcctaaacacagcatgaaacaaatttgaagctggagccaccatttaatttggggggagaacagcctggaacacctggtgttcttggttcctttctctggttgagacaaacaccatcaccaaaagcaacctagggaggaaaagggtttattttagcctacaggttacagtccaaaaactatgaagaaatgatgcttaactggcttccttatagagcccagggccgcctgtccagggaatggagccacccacagtggactgggtcttcttacatccatcaataatcaggaaaaccctgcagatatgcccacaggccaacctgatggggattgagattcctttccaggcgacttcaggctgtgttgaactgacagttaaagttggctgtcacagcagcctgactttttacctgggctctggggatctgaactcaggtctctctccctttgtgtctcatgtaatttatccactgagtcatctccctggccctcactgaattatcattaaagaaattttggttcacagcattctcattctattgtagtgtgtgtgtgtgtgtgtgtgtgtgtgtgtgtgtgtgtaaactgtagaccagtctggcctcaaactcacggagatcctgtctctacctcctccatgctggggttataagcgtacacccaccaaactaaccctgcatacattagcactgtgttttcttgtttccatttattttagacaaatcttgagtagaatccagttgtggcaccagatactacgagcatattctctacaccctgattatgatcaaatataatacatatctaggataaagcctttaaattgaactggagcctgtgacatttcatcctgtattcacgagtgaatacttttaatctttcgttcagttgttcatggacactcaagctcatcacgatggtgcatgcctttaatcccagctgaggcaggaaagagagagaggaggagggagggagagagggggtaacagaagtagacaggcataactggtgggcccctgagtggccagatcatggcagagaggccacaaagcagaggcccagccagtttacacagggtcatgggggccaatagggacactggatgtcactcacagcgagatggagacattgatggtgtaccccaacttctgtcctagcatgctcattccactgactgcagagagaggacagtcaagacaaggatatgttgggaggattacacaagagaggaggcactggtcacagagccacgccggagatcagaatcactgggcagacctagagccacgccagagatctgggcagaaagcactatgtacattttaaaagggaaaacctataggggttttgtccattttgaatgaggcgtaagagacagaggccacagatgaaccaagatgaaaatcctggccatgtgctggatggcagcagctcacagaactggacactgttctgtgtgacagtaacaacgcctgattctcccaagagaaatgatctttgttgttgttgatggtgactgccttgccgttttaaggtggctgttaggagctttgcaaagaaaaaaatgtggctaggcctggcattacactcctgtaattctagcacatggaaggcaaaggcaggagggtcaagagttcaaggccagcctcagctacacagtgagtttaaagctaacctagtctacacgagaacatgtctcaaaaaaaaaggtaaaaatacaacagacgaaaatgggaaatacagaagaaaatgattctacaggcaattacttatttatagatcatcacaagttaaaagttaggccaactgggccagtgagatggctcagtgggtaacagccttgtcaccaaacctcacaacctgagtttgatctccggaaacttaccctctgacttccacacaaatgctgaggaatgcataacacacacacacacacacacacacacacacacacacacactaattaattaagtttaaccttaagctatgccagcagcaataggtgtaactttcttcacatgaaatggcttttcaatggagaaacaccccaggcaggagcagtgtgtgtgttctccaggtcatggaggcctatcctgcccagtggttagcaacagctttgcctgcaccagtaggctcattcgtggagaatgagaaaccgcaggccctaggctgctggatgaaaacacaggagctcctgggcttctctccttttatccctgaacaaacacaggcagagagcaggtgtgatctcctggagcagtagctgctcagctgagagtcggggcccctaatggttagatgccacgttccccttctgtgtgactgactccagacagaagaggaaagccgccccaccttgggctggaaagtttgtttatctgaatcccggggctgataatctggtagaagctacagattcattttctaaactgcaaatccaacagtcagcttgttagaaaaattgctagcaagggggctgacttccattgtttgaagaagggctctttggcgccatcctggaagcaccaattcctcaattacagaagtctatagggggatcaaactggaaaaaaaaaaaaaaaaaggcaaaatttcagaacaattcatttggggatctgggaaagtgagtcgcctgatgtgcactcatgaagacctgagttcaaaccccacccccacatgaaagctggtcatggctgcacaagcctgtaactggcacgggcagtgagaaagcagcatccagagagcttgctgggctgctaaccaagctgaggcagcgggaatttctggttggggagagagcttgtctcaaggaaataatgaggagttagagaaaggcatcccatatctggctctggtctctacatgtgcacatacagacttgagcacctgtgcacccgtgtacacacaagaacatgtcatttcagagagagaaagaaagggtgggtggactgtttcccaggaacacaattaacagagagtgtccacagcttcccagaggtctcactcaacccaaatctgaatccagtttctagacagaaagaccgcaaatgttcaataactgacatttccattaaagtttaactccagctggccatgatgacacacacctgtgatcccagcccttgggaagctgaggcaagaggatggtcatgcatttgagtccagcctgcattacacagtgagttcaaagtcagcctgagatacggcgtgagacactgtctccagaaagttgggagagagagagagacagagacagagaatgagaaagaacttatttcgcaaacctaatttctactcttccaggaggcttccctgactacatgaccacacaggaatccctttcttggtcccctgtcatatatactattcatctacagatacaaaccatcctgttggtctttattttctacgttgactcttaactccctaactagatgatgtgcaccccataaacagcacattaaatttctgattaaccccaaagaatctaaacaggggactccaagtgaattaaaaaagctcaaaatgcaaggttcccacagcacatacactacatgcatacacactgacaaacatactgtgcacacacatatgccacctactgtgcacacacacaaacacagagtgtacatgcatgcaaacacacactgtgcacacataaacattttgcacacacacatacttgtatgcatacattacacacgcacacacacacacgcacagtgcacccaagcaggggatgctctgccatggctcccagagccgtttctctgcagcctgcttgcactgtgcattcgaacgagcacaatctctccctgaatcccactttcagagagcagcagtgttctccttggggctcaggaagcccctgtgcctttgcacaagaaataagcgaagaccaccctggtaatttgcctcctggaagctggaaactgctccctgcattgctctgggtcctggcatagtaggtgcctctgtggaaacagtcctgacaactcctgagggttcttgtctgtgggtggtatcacccagccagttgtgttgtccctagcttgccaagagattcacagacttggcttggcagacccccacgcttgatcactaaccacactggggtcattcacagctaatgtatgctcctcagttaaatgcacatacatgagagaaactcggtgtccacaaagtgacccaaaactgggtgtggcaaaattgtgcattgctgtataaatttgccttctctccaaagagctcaagcttgcgtgtgtgtgcgtgtgtgtgtgtgtgtgtgtgtgtgtgcgagtgtgtgtgtgtgtgttggggaacattattttgtttagcttcctaattaattttgctctaattctctgagtggttacatgaaaatgagtatcgtagtaagcaaaagacacccccagcttccctttcaaactcacagaaacacaccttgctaaatacccaggtaaatcaaagcagcaatcagcagctagggccaagcggtctgagggacaatcttaagcaccacacaaggacactttgttttatctgaagctctcagttatacacagaagcaggcacttaaaattagaaaggaaagtaattcgttagacttgcctgctcgcttccttccccactgttcttattactcttctcttctctcctacccctcaaccctccctcctcctcctcctcctcctcttcctcttcctccgtgtctccttgctcttaataacatatcacactgctgccagcccagagctctgtatgtgccatgagcccctaagactttgtgtgacctgctatgactgtgacccctgatgttccaggttcctcactagagagattatcatttttccaaagtagttaatccattccaacaaggtctcaatgaaaaaaaaaaagccataatctaccacactcctagacttcagaaatattagtaacctgatggagtcgaccctcatcgtctttgtgccttcacaatgtgcatgcaaatgctataaattctactcaggtccatggaggtcccttgttttgtctttaggctccattctctgtttgctaactgtcacaggacaagtaaagtctctgcttaactcacctccacctctcacaccatcccactccaatcccgctctaccaccaccgggcccatctcttccaacactggctttaatatttcctcttgcatccgattctaactcacccccctttgccttttgttgagtgaccgtgttgggtatcctccctcatactaatctttcattaacttttttttttagttattattcttcaacaggctctctcaacatgactcactccttccacgggtcttcagcaggcctactagccttctaccaatacaggtccttccagccagagcaactgttcttaatcttcggaaatgactacacaggaattacctctctgggtgacagtcattcccacctaacttcaggaaggtgcctctcacccagcttgtcaggaaagcctcaggattgtggctccccagctgtctgcagaactgtccactgggtgtcccatttctcacgtgagacagaccctgctttcacacttacagatgccatgaccacccctagtatctgaacaagcttcctcccaggagcccacactcctcagcaatgacacactgctggggagaccaagaagcttatttggcttttgagttcctggggaccatgaaacatatatgatggaacaaatgaaaaactcaggcaagcctcggagtccaccagccaagacaccgttgaaaccgtcgccatgcctgagggattgaactcgggccctcacactcacacagcaagcactctaccccctgagccagctcctagaccctctattaaatgtttgcactgcagcgtggcggtgaaatccacagggagttacacaaagtggacttaccattggttagcactgactttaaatgctcaagtgagagctgaaaatggacagtggtccaaagccacagtcactcagattattacccacaaagctctagaccttagagactaggggaaagcccctgctcattccatgacggacaatgccaggtgctgctgagaagccaaacttggtgtcttttcagtcgagaccgtcaaactcctctaatgagttccaattgctgtgttttcttctgagcaagcaaaggggcaccaagacattaattatagagcatctctcccctggtcctcattcttttcctgcagtgctgggaactgaacccaggaccttttgagtgttgggcaagcgctctaccactgagctacaagcacagccttagatctgctcctgaatcttgagaacacaggaactcttgctttccctgagttaagattgttgcaggcatgaacagcacaaccaaacagtacattcacattcgaaattaaagtcttgctacctcaaaataataataataataataataataataatgatgatgatgctaggactaacatctattagtttgggtgggcttttttctttttctcaatggtaacaattctggctaatgtcctgaaagtagtactaaaaccaaacacctgccagtctagtggcacacgctataaccccagcactcagacagctgatgaaggaggacccttagtttgaggtcagcctgctacactgtgagaccatctcaaaagacaaaataaacatgagaggagctgaatataaccagaatatgatattcatccataagactgtcataataagagtcatcatgttgagtgttaattaaaattaatgtataaggaagggtgcagggggaaaaggagtttgcagcgagagcctgatccccagaagtagcacgggaaggagagcgtcaactggcatgcgtgtgcccacatggatcatgcacacgccatgataagcattttgaggaaaatatcaaaagcattaatgctctatttttaattacagccttgtcttctacaacttcataaagaaaagagtaattttaagttatctgcctcaggatgatgtcataactcatgaatcacatggaatttccccagcactgtcatgggatctttacatccgctattcagtatcgacttggtgtccaaagggatgaaaagtggagaaaaacagaaaattcaccatgtgaagaacaatagacttaggtgagacaccatgagaacaagaaatgattcctgtctctctctctctctctctctctctctctctctctctctctctcacacacacacacacacacacacacacacacacacagttgttctcaaactgtgggtcacaacctctttggcaaacttctatctccaaaagaaaatattacactatgattcctaacaatagcaaagttacagctacaaagtggcaatgaaaatgatttgacggttgggggtcactgcaacatgaagaactggattggagggtcacagcattagaaaggttgagaaccactgctctccagcctcttacagagcaagacctatttcttttttttttttctactttctaccttttaatcttagtctattttttgttcattttttaattaattttttacattccaatcccagttccccctccctcctttcctctcaagccctgcactcccccctcctcccacctgctccatggagagggtgaggcctcccctaggaagtctactaagtctgtcccatcatctcattgaggcaggaccaaggcacctctccaccccccacacccctgtgtctaggctgggcaaggcatctctccatatagaatgggctccactaagtcagtctgtgcattagtgttagatcttggaccctctgccagtggcctcaaaattgtcccattcgcaacattgtcacctatataaaggaaatctagttcggtcttaggcaggtttcccatttggcaagacctatttctaactattgctgtcaacactgggtagggtctggtgtgtcagcgctcccgaattaggagaagattttctcgaatcaggaaaaaattgatcatgaatttgagcttcaggtcagagacttagatttccaagctaaacatgtttcaatgtttgaaacattcttgcctttcactcttgcatctggatagtcaccctggttataggatccaactgcccaggcctcatctaaagtgtgggctctgtgtctctggatggcagagctggaaatccctctgagccatgctcgccgaccctatcgtcccatcatttcctgcagtcaatacgtcacttgtcactgtgtcatctgcagacggttgctctaggcatgcagtgccaaggagggagagagtcgtcacacaaggagtccaccttctcacacgggcccatggtggtcttacgaaggataaccaaggcctttgtttccaaaactacatccttgacaacatgaaagagctatgccaactgcactgcgaccacggtccaagtcaggattgttccagggaaatgggatagacagtcacaaccaataaacttaactggatgctctgtctacacaagagagctcagaagacagccggcagaaacagggcagtaagccaagccccggggcagaagagcagaaagtagacaccttacatgagcaggagggaggttgaggagaacagaaagcagacctgaggggggacagccagcaggccagccattaccctaaaagctttaaacatcttgttgagtttaatctccaaagcagttctacaaaacacacataattacctcactttagaagtgagttaaatgaggctatctgcccatgatcacgcagccagctgacatcacccaagcagcaaaaacagttgagtcataatgacggcaaacactgtgactgaaggctctcaaaaaggtgcgcattctggggggactatcaaagaaaatactagaaaaaaaaagtattatgtttacttctctatccttaattcttttgtgtatgatgcaaatgtgtacagttcggtattattggaacctgtgcagaacacaatcacgtggctggctgtgtgtggcgtgccatcatctaaggagggcagccttcgccatcttagtcacagctgccatgatgacctacaagaaccccatccctgaggattgtggatgttccctcctggaatggatgaggaagtgcactgcacccgcagctgagacccagtgctccctgctgcaccctcactgtgtatacctcagcctctgctgtatgtgatgttgggaagtgctggcagctggaagggtaactaaggggggggcgcggggggagtcaatgcagatgcagccttgcagaactcaccacacatgccagagggggactcggtggtggtgcagatgtttgggggttgttttaattttttaatggccatagctgtacctgaccctggagtgcctgctctctatggatcagcgcaccatctggcccgaatagatatttggtcatgcctcccgcacggaaagttaacactcgcttttttgtgataggacatcaactcaaataggtggaaagatgactgtgtctcagagttcaaagcagtggcgagtcatctctgcgggagcagttttaatggttgctgtggcatccacaggaccggtctcgctactcacacacagtgctgtagccatgaggcccaggcagtgtgaccaaagctggcttctgtcttccttcccttccccatgttttcataataaacttccatcggctcaggccaaccagccttgaaatgtcaagcacatcacctcataccagaagtttcaaatgtccaaaacccagacataaaattatcccaagcacatgcagactctctcacaattacagagctgtgtgtctagctgaaggtctgtgcatttgtggtagtaatagcacactatatgggtaagcaggttcttttgcagcgaaggaaagcaaggttttatcaaagagtggaataacggctcgtggcaacacagaggatccccagtgggttgccccagactccttcaagggaaacaattagaaactgtggagatagttcagtgggtaaaaacactggctacaaagcctgaggacctgagttcaagtcatggaccccacatggtgggagagtgtgactgccataaattgatctctgacgtccacacatgtgtcaggcgtgtgcaagcacatgcaccaaataagtaaatctaatttaaatttttttagcattttaaaatttcatagtaggcatctaaaatctcctaggccaggtgtggtagtgaacactttaatcccagcactggggaggcagaggcaggtgagtctctgtgcatttgagtatggcttagtcttcatagaaagctccaggacaaccagaaaaaaatattttttgagaccctatctcaaaaaataaattaattttaaaacttgtcttaattttaagcaccctagaaattaataaagctgccacaaagcttgagcctgagtcatctcagctgtgccgtgtcagtttggggaatgcttagctgactctcttggaggcacataagtctttgaatccggaacatgtgtgcttagcacaactgttactcttcctctgcctatctgataaaatttatcagaggcacctggtgctgtgacaatgttttaggcagagacctcatgagaacaacctctgggaacacgggagacgtgaaagccagagtggatggctggcagctcagactctcccggctaaggcggactggaagctcaaaggcagttctgagagggctaggagtatttgcttctattcattgtaatcccagggatagtgatgttagctaaaatatgatttaaaagaaaagtgcccaaattaaaaacccagagtgcgctcctctctccaggctccttgtcctgcagctgctccctcgcctggatcctgccttgttctctgattggtctcttcccagctctgccacactttctcatatcccatcaccccctgctcgtcttctttctgccttcaccagacactgaacatgttaagagtttaataggaattgatactataagcacttgtgaggctgaagcaggtggctctgtgagttcaagaccaggctggtctacagaggaagaaaaaaaggagaagagaagaagaaagggaggatgacacagggaggggaaggaggagagggagagggagagggggagggagggagggatgacaggagggaggcgcccaggcaggatagagtagcaggcctggtagtttcctccgaggtcatttcacctgcagcagcctgcacaggcattcctcagtggtcccggctccctagctagagctgggtacctgaactagcaaaggcatttctatgttctcctaggatcaaataaaattagcatttcctgtcctgtaagaggcctgcagcaacctgaaaaaaaatggttccctgttctcttgacctataaagccatgcaaatcaatagagtcaaatgtccttgctaacaacacctgtgaaactctccgggcctcaaacatatctggaaagtctccgggtgtctgaaagatgtcactgtaaggaagcaccatggcaatgtgaaggatgagtcagggagtaatgctgaaccttgagacttagaggtagattctcccccaggatgcagagctcagggtcaagtcaaccctagcaaaacagggagctgctcctcatggaaaaggaacaaatcactccttagtcacaagaggatgctgtgcagaactgagatcccaaaagaaacaaaccttacagcacaggcatgagcgcagcataaaaccacgcatttgctcttattttctacttggtggcaacaggaacataattgtaaagcttaaatagtctttcagagagtttatgttgccccggtgaagccttggtaaagaatacaaactgcagggtcttctccaggattgaggtccagaccaatgtggattctcctgctgatttacaacaggagggccatctacctctgactaacccagtgtctatcaaagtgagtctcaagtaaatcggtaaatgctacagaaaagaaaaaaaaaaaaaccaaaaaaatatccacttctgaccagatggcggtgactgggccatattcattacattaactaacttgtggtaagaatgttctgtctgagaaatgctgaagtttgtcccttcacatttgtctggcaaggatataatttatgcaccaaattcaaatgaatcctgtgtttccctttttccatgtaaattagcccagggtagccaggcaaggcatttccccacagaaaggctccctttcaaaggaaggcaaagagccatttgtaactgttggccttccctccacagctgctatttaaatactgaggtcggattcaatttcgattgtaaaattgtatcttgcctaagaaaattaaaagtggtttcacaaacaacaggcaaatttagacaaatgaaacacagactgacactgtgcgctggtgcctgcccacaagctagcaggtgacagacagcattcctacaaagactgactaaaggtggtgaacactgaaagagtagctttgggcagagcaaggtgtgtaacctactgccaatcactttcaataaatccaagccaagtctgagtaaagaaggcaaacaatgtagcaaccaagagaacctagaacttagtttcacataagggatacagataaactaaagccaggctcagcacttcaggaagtgtgtcaggactcagataatgacacccccagatgtggtgctgtgatgtgcccagctgaagcaggggtagcagactgcagtctccagccttccccttgccttggttctcccctactccttctcctaagcacagcgagaggcttctaccgaattccctcaggggacagaacagggggtcgggtgactataactgcctttagtcatctggctgaaatttcattacccaagaaaaatcaaactctgtcagagaggacgggaattaaaactaaaccagaatccagaggagtgctgtacggactccatccctgatcatgccccctgagaatcacggatccccccccccaaagtgcctacatcccctgccttcctctcctccatgaagagggtattgaagtttcaaccaccagacaaagccatgtcatgtagctcccgaagatactgtatgaacaggaaagaacaaaactcaagaaagccaataacacgttagagttgttatgagtatagttggatcttgtatagcctcctctcaaaagacccagagaagccacaggggtacccagtccacacctcttcctgtcacctagttcaggtcatggcctgctgcctggctgcagtacactacaccagcaaatacacagggcatatgcagtaaattctctgggttgccagtgttttctccactttctacgttgaaaggttcaggcattatgctggctgcccctgttacctggcaggatccactcaggcagtgccctggtcagcccagggttccatggaaactaagtctgcacgcaggtgtagaggacccctttaagagacagaccctgcccacgtaggctctcttccctctgttctctttgcttctcttctctctctgcctcttctctcttctatttctctctcactcgctctccatgatataataaactggttacaatgtctcttagactcatgtctcatcttgcactcctttatttctaatttaagcaaaaacctgacaatgtaccaaaactttggttagcaaagacagcatttctaggctccttggaacctgggctttttgacagacttactgagaagggcaaagagaggccatcagggaaagcccggtaggcacagctgcccatcctccatgtaagggtgaaagtaggaaactactttctctattggttcaggtacctacacgcctttaactttattttatctctttttttttttcttggtttttcaagacagggtttctctgtgtagctttggagcctatccttgcactcgctctggagaccaggctggcctcaaactcagagatccgctgggattatagccctgtgccaccatcacttggttgcatctttaactttcttaatactgggagaaactgtaattgggaataggaattaggagttaagtgatggttcagctagctaaaacattaccttacaagcattaagaacagattctcagcacttaaaaaaaagaatagaaagaaaaaataaagaatagaaagctaggcacagcaaaaggcacacacttaaaatcccaaggctgagagggcagagacaggaggatccctggggctcactggtcagccaagctgaatagcaagctccaggtgaaggtgaaggtgctggccgccctaagatgcaagcctgataacccgagttagagccccagaagccatacacagataagggagaaaaacaacttcacagagttgtcctctgacctccacacatgtgccacggaacactcacgtgtgtgcatgcacgtgcacacacaagtaagtgataagtaaaagtaaatttaaattatttttaatataaggtggagtgtgaaggaggaagatactcagtgttgccctctggctgtgacacccattgtacacactcccacagagttgcatacacaccaattaacatacctaggaatacacacatatgcccacactatatacagtcacatacacaaaaatacagtaacaatagatactaaaatcctttttgctaatgttttacaccaaaatatcagccccagtgtggtgtccacacggggacagccataacagctggctttgtttgttttttcagtgtgccttttgaaggatttggatgttctttgtctacaaccacacttcagaacctagccacacaaccaaatctcttcaacaatgtctcttccaaaattttcccacatctgggcatttcattatgcagatacaatcagagttcaaattgcttaacaggaaacttctttggagcagaaggctgtcccagacttcatgaaggactccctacaaaaagcagtacaactacacaatgactcaaatgctaccctaagacaccatcttcagcccatctgttgaagggaccagctcccctttcagcagccataacagccgaacacgtgcnnnnnnnnnnnnnnnnnnnnnnnnnnnnnnnnnnnnnnnnnnnnnnnngaaagacccgagctaacatggggttagctcattaaattacaataaagcctcatgcagtttgcagcaagctctcaaatccacctggtgattggggtgaccgcagtcgtggcctgggaccccggatacctgagttttccaggggtctaacactgtgattctaggacaggacactccccaggtcggcttatcttcttccagtgttctagtgttgcactgctctctgcaagcaaaagtgtaaccacctcgggtggtgcgcagccagctgagactggatttcagcggctgaagagagagaggctttgtgaggttattatgcaccttcttctttggaagacggcttccaaaccgcttccaagcgtttgcaaaacaaacatcaccacccgccagcactgtttgctttcttctgaaattgctgtatttgccatgaaaaccacagactataaacaagagcgcctgatcagaggagaccttgaaaccactgggtcactgagtcaacacctaaggaggaaggcagtcgactgggatctggaatacacgagtcagaaatcaatctctcacctagaatgtcttactaactcaaaagaacagtaaagattgtgctatttcagggagatacctggacttcacacatgaaacaggacttttagtctttttaatactcaggagggggagacccaaggtacacctacctcaggaccagcctagtctgtgcgtatttccacttaaaatagtgctttgtccaagagtctccccaaacagcacaggctattgtcattgtccctggttgaagggcaggccctatgactgaagacaccatatacttccaacaccaaacttgggagaatgaaactgaactgactcggaagcctcctccttgaggactagctctcatggtatcagaaggagctgtacaagctgccgagggaggaaaaaaggatcaataatcctacctagctgtagagcctacaaaccacgcttgtgactgtcctggtaagatctccccaggggtgccatagtggcattgttatcttgggggtaaccaacacctgtcaaacttgactttagtcctattcaacaagaaataactcatgtctggtactctaaacctagccaactaccaatgagtggagagatcccacaccccagaggaaaacccactaccaccatgtaattgctaactgtattctgaactcttatccttaaactcccagttaagtgcagctctcacctctcgtcaaggaagcctcttttgtagaagacaaagatcatcacagaaaaccacaactgctcaaacagcagagaagtgaccaacctaatccgactgatgtatctgcaaagcaaccactacacctaagtccaggaaaagcagcaaaaggcagaaagattacaacagcccaagaaccagagtacctgctgctagataacaccatctagacacagcagggaagatgcccccctgaactcccagcaatatgttgctaaaagagaccagcataatgacaactccgaatgatatgtctgcaagcccctcccccaaggcctctaactgccaggtcccacccacagaacactctaagtgccctaacttctggaccctgcccctgccctacagagttaaaaaccgaatgtctggacatgaaatcccatcactctccacaaggaaagctccaccctgaaaagttcaccccttcccaagaaactgtacataagccctgcatcctgatcagtttgctgctgtttcttgcccgagcagaagcagtcaccctcctggctttttccctcccactaaatcaattacgtggtggtgcacgcctttaatcccagcaaccgggagactgaggcaggaggatctctgtgagttcgaggccagcctggtctacagaacatgttccagaacaggctccaaagctacacagagaaaccctgtctcgtgaggtttgctgtgcagcgtgactttgtggtattccttggctcctggctgccaaggaattccatccgagctgaaatgctcacaaaatcaacatggatgaaggaaatatctcaaagcccactcctagaaaaagagctacaggcaattaatggctgcagagaaagggagaatccctttctctagtataaatccctggtaggttctgcaatcccaagtgacactcagaggatcaacatatgagggagaaggggtgtgcagcaattttaaagaaagagaggtcatgaatttgcaagtggggacacaatagaagttgaagcaggaagagagaaggttgaaaaaatgtaaatatagtatacatgtatgaaaggctcaaaactaatctaaatttaaaataacaataaacaggtatgtaacaccccacacacacacacacactggacatacttttatgcatgctaagaatgtaagaactgagccaattcaacatttcacaatatgcctgcctgtcgtggagttggagagatgtctcagctgttaaaaacacttgctgtatgcccggcgttggtggcgcacacctttaatctcgggaggcagagacaggtggatctctgtgagttcgaggccagcctcgtctccagagcgagtgccaggacaggctccaaagctacacagagaaaccctgtctcagaaaacaaaacaaaacaacaacaacaaaaaaaaaaaacacttgctgttcttgcagaaaatccaggttcagttcccagcacttgagtggctcacaacaacttgttgctacagctccggagacttcaacacccttttctgggcctccacagacactgtgctctctctctctctctctctctctctctctctctctctctctctctctctctctctctctctctctctctctcacacacacacacacacacaccagaaatctttaaattttttaattatcttattatttttacgaatgggtgtgttgcccacatatatgtctgtgtgccatgtgagcacctggcaccctcagagaccaggagaagatggtttccctgcactggagttacagacagttctgagctgcttgtgggtgctcagaatctaacccgggtcctctggaagagcatcctgtgtccttaaccactgagcaatatctccagccccaaaacaaatctctttaaatatgcttatagtatggtatgtttagagtggctatgcaaaatgtttaatttaatttgtcccagatcagtcacctagcaactgttaaaggaaagataaataaacctttgacctatataagtcattggtgtcatcgggcctgtttctccaaatcgcaacattctctccaaattgaaacatttgctccaggagtcccaggtagtaaacatgactaaactgaagtccgggtacctgaagagagttagagcctggaagattctttagggcctgtaccaacattataaaagcgattaaacaatgctcctaatggtcacctatgctagaatcggctttcctgagatgttgctgcttttgagttatccctactccttagaagcaacctttcaccccaattaaaaactcacgggtgcaactgttacttttatctgctgtgggttccctttctggagagagtaacacatgcgctgttgtctctccagggaaagccgttggaacagttttggggttgttttgaaaggggaggcttttggatttctgtaaacaacagataataagaatgtattaaaataaggctcattgggtaggattaaataatttaatgatataaagcaatcaatcagcatacagtaaggacttgacaaatatttgttgctgatgagcctttttttaatcatcatcaattgttgaatcacttacaatcacctgttcctgactatagtggcatcttgccttgccagtgaaagttgcagtagcaaccacacccttttgggcgtggtttcaggtgcagaagatagagaaggggggtgctcactctctttagtctctcggggaacagagactgcatcttttggagcaggaaccaccgggccattattttctcttacctgcgtaagttgttctttaaaaaaacacctattcatctttatcttgggtctggtgaactccttaattcccccgcctctacccaaccatatctccagtgatgacagcctggtgcttccatctctggtcactcaagagaacagcggggctggtggataacatcacagttcaaggaggcatccggacgctgccagacacaccagtcatcaccactgcacagtaactgtagccagcagagaacacactcctgagagccgtcctctgaggtaggcagcaataatagtttcttaatgacattcatgaaaagtcgaattgttggcctgaaatcccaggtgtccctccctcagggacaatccttccaagaaaaatgcaacctaattaagaagcatgggctgcacttagagcaggaagttcaaatctcccacaatacctctatcattgtagctttttatttagcccttatcgatttctaccttgactaataattatttgtatacacctcttatctccctcgttagattataaactcctcgagaactatgtttatctccggcttgtctggagtgtagcaatgatctctgttgacagtctacttttaactgactgcacggccgtagcatggacttcccatcttaaagtatggcctgcaccttggtaaaaataggataatactagatcacgtgagatggcacacacacaaaagaccattttaagaactcaaagctgagaatttccacatgtaacacctttttttaaagacttgttttggagttgggcgccatctcagagcactggctcctcctacagagaatccagaatcagttcctagaacctaccttgagtgactcacaaccacctgtaactccagttccaagagatgcaacaccctcttccagcctctgcacatgcgtgatactcatacacacagggtacacatacatgcaggcaatactcatatacacaaaataaatctttaaaaaagaaaagggtttgtttttaattatgcacatttgggtggttcatggaggccaaaagagtgtgtcagatcctctggagctggagttacaggcagttgtgagcctcccatgtgggtgctgggaaccaaactcaggtcttctacaagtgtccttaagctgctgagcagcccccagaactctctgtcacagttttatctacttgccgtgctagctgttaaaattctcagatcatgatatttatccagtaggaatttagaccaatagcttcccgtgtagtttgaagggagaccgtgacccacgaacttacaacacgagtttgtttttttttacttattgtcagttgtaaaagtgtgcatgatatggctttatggcgtgtagttgtgcactccacagcatacctgtggaggtcagagggcaactttcaggagctggttcttgctgtcagtcttaacaaggcagcacctcccacttctgcaatagtatgctccaggcaagcagccttcatgcttccaggcagttctcctgtcttgcctctcacccctcttaagagtggtggattgcaagcgtgatccagcatatacaaattgttttgattttatttgatttttgagacaggctttgtctgtgtagccctggtggtactagaactcactttgtagaccctgaggctggccttgaactcacagagatccacctgcctctgcctcccaagtgctgggattaaaggcgtgcgccaccaacgcccagcagtgcatgatctctgtaactctgagtagctccatgggagattcaaacaggcgccggaatgtacttctcctcacccttcagctcttctctgaagtatcactgaagaaagtgaactcattaaggaaaatagactcattattaccccaactgggagtttagtgacagaggattagctatagacagcagttattagggtgacttccgcaaatgctcagtatctacagtcaaagtgacaccccgtgaagaacgctgaaggtcctaatacagatccaggcagctgtcagtctgagcaacaaatcattacatcacagttcgggttcactggaaaagcaaagggagaaagtcccttgagctacagtgtagtctccacgaccaagatggcttctctgatgggggaagtccctctgtgtgctgtgaatatatgtttctcttatttgtagatgactaaagctgttttggacaatggacaggcaggatgtatccaggcaggaagtataggcagggctaccagaccaggagaattctgggaaggagaagagagagagtgagtcaccagtgagatgccatgtagctgccacgggagcaagagcaccaggcttcactggtaagccaaggccatgtaaagatacatagattaatggaaatgggctaataattaagagagacctatccaataagaagtctgaaccataagccaaacagtttataattaatataagcctctgtgtgtttacttgggactaaacggcctggggactaggtgggacagaaacttccatctacacttctccccagaataaagtcaactgtactatgtttagtccttggtgcttgttaagtgtcaaactaaccaacagggacctcagtagaaaactaacaagaccatatgatggccagaaaatccctgagaaactgatagttgatggcatgtaaaaagaattaaaacatatcaagaccacagaagacaggagctgcaggaaatcccttgaaacagacccttgatgtgaggaagaggttccgactccctcgggcagctgtgaacacgaggcagaatctccaggcaagcaacgtgtaaggactcaggcattatgctggctgcccctgtcacctggcagaatgcactcaggcagtgctctggtcagcccagggttccatgagtactaagtctgcacgcaggtgtaaaggacccctttaaagacagactccacccacttacgctttcctactctcctactctctcactctcttactgttctctctgctcttgctctctcttgctctctcttccttcatctctctcttcaccacctgtcgctcccctccccggcccccctgtaataaactccacggttaatgtatctcgtgttggtgttccatctagcacgcgtctttaacttaaaagaacaacacaaagttcaaagatcgggagggatgtgaaccatggctctggtctcagccctgcttcaaaggtcagtgaccttatgctgtgtgacctcattaccctcagattttggaaccccaaatctggatagcaacaatctctaacgacaaaataaagaagactcgggagcccgaagcaggatgctgcatggaagtatcaaataaatgtccaatcgattacattagctgatttcaaacttgaaaccgtttgtctttgtgtacaaaaagaaaaagacaggccctgaactcaacatgctggactcgctgataatcacatacatacatacacacatacacacacaggcacacaagcatgcacacacacacacacacacacacacacacacacaggcacacaagcatgcacacacatacacacacaggcacacacacatacacacacaggcacacaagcatgcacacatgcacacacacagcttgcatatacgcgtgagcacgaatgcacacactaataagtcttcattcgtgtgcctgagtgtgtaacctccatgactggaggcaaaggtgaggccatgccttcaaaacaccctttgtagtcaccagaaaaggaagcaggttaaaaattttttccttggtcacacccaagccccttcttctttgctacctgctattttcactgcacagagccgaaatccatcctttgaattccagctcctgaagcaccatgacatatgacctctaaacatctgttgcttgccacgagtggccctgtgacagacttggtgggttatgaaacaggcatgggtcaacaattgcagaatctgaagagttggaacattctagtccaaaaacccaacactgtagagaacctcttctctctacttggccctcctggggacaggttccttggcttcaccatcatgtctatgtttcctcccccacagggacacagaaagacatgtaaacctcttactctgatggaagctagcttctcctgactgaaaagtaccatacactggcacacatagacttttgtacaactccattctacaggagggttttccagaaaagggagaaatacaaaagggaaataggcaagaaaaaatgtaaagtcaacataacataagtgaaagtaaatgtctccatttaacacaataaatgtgaaattatacatcaaaaaacaagactagtaataaatcatgttgacattatggcctgtgtgatacagagacgtacacataacctctgtactgtaagtctccagactttaacccccagctaagtgaactgtaaccaaaacagcacaaagagccaagccaaaagaaagtcaataagatgcctggctgtaatctccaaaaatatcaagagcaaagtcaataaacaccgaagcattgcaaccctgagacaatgaatgagacaaggtgaccaaatgcagcaggggtttgggggaaaaaaatggacacccttctctgatgaaaactggagagacagattggctttaaagtgggagcaggaactgactgccaaccagcagggagaggagccgagagtctgattacaggaaaaccaggctccagctcagggtgattgacacattgaagccctgcccactgggtaacaggggcccaggcatctgaatctgtttgcttcttgggcacagagctgttagcttcaacctttcccattcaacagaataagctgcactggcacacaacctgctgaggggcacaaaatccccctgggaatccggctgctgagactcacagcaggagacctgggacacccctgggaaccaagtttgatcacacgatcccagagagagcttggatgtctcagcccacagcatccaatggctggggtgttttttttttttttggggggggggggaggatcttctatgggtaaaattcaatgactgagaaacaaaaataaaatgaaagaaaactctgccccagaagagggtagggtgtaaagggatagagccaaacacacttgatggaaatgcattatgcctttttattatacatttgtataatgtaacttcatctgcaatggctgtccctgggaagactgaagagcctgcaaaccctgagcaatgagcattgttcttgctattcagctcaactctcaagggacagtgacagatgccctcagaggcccctgacaggtgacccactttagatgacacagctctcagacagtgcggttaaaccctgacatccatgcctctccctattacaaacactgccttgtcccagtttgccttttagactattctctttgaactatcatgagacggtgtaaggtcggaaaaatggaactatgaaaagttaaagttttcgaacagcaaagacatccatcgtcagaatgaatgggcagaatgaagcacactctgtaccagccataccccagacagggaagttagcatatataaacaactgtgtgctggctagttttatgtcaacttgatacaagctaggatcatcacagaggacccagaagcagacacccacagctaactattgagctgaaaccctggaatccagttgcagagagggaggagtgatgagcataggggtcaagaccagactggagaaacccacagaaacagctgacctgaacaaggggttgttcatgaaccccagactgatagctgggaaaccagcatgggactgttccaaaccccctgaacgaggatggcagtttgaaggtctggttaatctatgggatctctggtagtggatcagtatttatccctagtacaggaatggactttgagagtcctctccaaatagaggaacactctctcagcctagacacacgggggagggcctaggtcctgctccaaattatatgacagactttgaagatctcctatggaaggcctcactctccctggggagcagaaaagggatgggatgggggttagtggggggcaggggaggaggggagggggagggaactggtattgacatgtaaaacaagcttgtttctaatttaaattttgaaaaaggtggggggggggaagaaaatgannnnnnnnnnnnnnnnnnnnnnntcgtgtgggggggggaaaacccaaggggggggttttttttttttttttgggggggggggaggatcttctatgggtaaaattcaatgactgagaaacaaaaataaaatgaaagaaaactctgccccagaagagggtagggtgtaaagggatagagccaaacacacttgatggaaatgcattatgcctttttattatacatttgtataatgtaacttcatctgcaatggctgtccctgggaagactgaagagcctgcaaaccctgagcaatgagcattgttcttgctattcagctcaactctcaagggacagtgacagatgccctcagaggcccctgacaggtgacccactttagatgacacagctctcagacagtgcggttaaaccctgacatccatgcctctccctattacaaacactgccttgtcccagtttgccttttagactattctctttgaactatcatgagacggtgtaaggtcggaaaaatggaactatgaaaagttaaagttttcgaacagcaaagacatccatcgtcagaatgaatgggcagaatgaagcacactctgtaccagccataccccagacagggaagttagcatatataaacaactgtgtgctggctagttttatgtcaacttgatacaagctaggatcatcacagaggacccagaagcagacacccacagctaactattgagctgaaaccctggaatccagttgcagagagggaggagtgatgagcataggggtcaagaccagactggagaaacccacagaaacagctgacctgaacaaggggttgttcatgaaccccagactgatagctgggaaaccagcatgggactgttccaaaccccctgaacgaggatggcagtttgaaggtctggttaatctatgggatctctggtagtggatcagtatttatccctagtacaggaatggactttgagagtcctctccaaatagaggaacactctctcagcctagacacacgggggagggcctaggtcctgctccaaattatatgacagactttgaagatctcctatggaaggcctcactctccctggggagcagaaaagggatgggatgggggttagtggggggcaggggaggaggggagggggagggaactggtattgacatgtaaaacaagcttgtttctaatttaaattttgaaaaaggtggggggggggaagaaaatgcttccataagatggggctgtaggcaagcctgtagggtattagtgattgatagaggagggaccagcccattgtgggtgatgccatccctgggctggtggtcctgtgttccataaaaaatcaggctgagccagtaagcaactcccttcatggcctctgcatcagctcctgcctccaggttcctgccctgtttgagttcctgttctagcttccttcaacaatgaactaccttgtggaagtgtaagcaaaataaacttcttccccagcttgcttttggtcatggtgtttcatcacagtaatagtaaccctaagattcaatcacacagagtatagcacaaaaagtaaaagtcccagagattgatattagggttcaaacttcaagctgaagatcagaaaagcaaagcagccagccactagctcttactctacctcagactgaaatgcaatcctggctccaccaaaccgcagactgtaacctctcctcggcgtggctagagaatcctaagacttcagtatcttcctatcctcagtgtggctggagaatgactgcctgatactgactactgaagaccctgctcccatcttttatacccctctagtgatgggattaaaggtgtgtgatcccaggtgctgagatcatcttcttgtgagctgtttctctttaggactgggatcactcttgtgtagatctgggtggccttggactcacaaagatcaactacctcttaatcctgactcctaggattaaaggtgtgtaccaccacctcctagcttctggctgctgggattaaaggtgtgtatccccactatctgatctctatagcttgtggctgactttgctttctgaatcttcatgcaagctttagtaaataataagtaatctatcaccacaacagagaatgaaacaaaacttaccatcaataaatggactggtgaaataaatagttcccaaaaaaagaaacacaaactatcattatacaaataaacattttacgttcgacatactaggccaatgcaaggaaaatgcaaatggaaactttaagattctatctcataggagtcaaaatggctatgatcaaaaaaaaaaaaagaagaacaaataaaatggcaaggctagggagatggctcagtggttaaaagcatttacggttcttgcaaaggactcggttcaattcccagcacccacctggggcagctaagaaccacctgtaaccacaaatctaacacctcttctggtctctgtgggcacagcacacatgtgacacatactggcacactcaggagcacatatgtgcatgcattcacacaacaaagtaagttttgtaaaagagaaaattggggaaagaggaatccttgttctctgctgggaggaggataaacttgtatagccattaggaaatcaatatggggatttctaaaataaaaataaagctaccatgtggtacagctgtccactcccgattttatgttcagaggactctatagctacaacagagaaatgtacacatccatgtttattgctggtgtgttcacaatagctgataaatggaacagtctgggtacccatccacagatgaacggatgatgagattcggcatatatacaccgtggaattttactcagttgtaaacaaaaatgaaattatgaaacttgtcagatatattcatcctttggggaaatgggtggatctagacattattctattcaactggttgggtttgggggcattgtttttgttttgtttttttgtaaacttgacacaagctacagttatctgggaagagagaaccacaattgagaaaaaaaatgtctccatcagactggcctgtaaaggagcattatctttattagtagttgatgtgggaggggccagcccactgtgagcagcactactcctgggcaggtgggcctgggttgtataaaaaagcaggttgagcaagccacggggagcaagcagcacctctccatggcctcagcatcagcttctgtttcgaatcccagccctgaatccttcagtgattgagtgtaaccaagagttgtgagctaatatgaccctttctccccaaagcctggcaggtggtggtgcaaagccagcctggtctacagagtgagtgccagaatagccagggtggttacccagagaaaccttgtcttgaaatggaaggaaggaaggaaggaaggaaggaaggaaggaaggaaggaagggggagggagagagagagagagagagaaagaaaaggagagaaaggggagggaggagagagagagaaaaagaaagaaaaaaagaaagaaagaaagaaagagggaaggagggagggagaaaaagaggaaacctaactaagacatgtattaagtgaggcactccagctcagaaagatcagtatcacatgttctctcttatagcttttaatgtttgcatgttgttatgatgtttttaatgactactttctgttttctagaacgttctgcagatcccattaatccttttgcagcagctgagttataaacaacaggctgctgcaactggtttctcagccaaggagaccatgaagagacttctaagagttcacttggaatgaagttctatgacaacagttagttaccacaaagcctcaaggtgtgactctgaaagccacattcatgcagcacaggactttcatgaagacaattaacaagctgccagtaaaatatcataacttttgtaatatgactgccacagaaatctgtaaatgggtagcctttagttcttactgaatggcttgaaaagccatctttcatgattaattaccaaggtttctttctttcttttttctttttcttttttttttttctttttttttttttttttttttttttnnnnnnnnnnnnnnnnnnnnnnnnnnnnnnnttttttcagacagggtttctctgtgtagctttggagcctatcctggcactcgctctggagactaggctggcctcgaactcacagagatctgcctgcctctgcctcccgagtgcatgagccaccaacgcccggccgccaaggtttcttatcagtgtgtaaaaatgacattgcaaaacaaaactcagataattgttgatcagcgatcccccaaagttcaacaacaacaaaaccctgtgggggaactgggaatgacacactcagtaccatttaacattatttacctaacgacaaaaaataatctaccctcttaagtcactccttctcaattcttttcttacctctgaacttcttgggggggttggtaagatcccctgcctctgggtgtaccacacagcggtcatccaccaacctagagggaaagaatgtttacactgttagcgtcatcacactcagaaacctcactctgcacaaggacatcgggtaaatatttacagttggaatactcagaaactttgagagtcctagattcatgaaaagatctggttgtgggaagaacaggaagcattaagtggtaggaaacctgttagatcagctttgaccttgacagccaccaacagcagctgagctatctaaagccctgcaagtgaaatgtcctgacctataggatgttgtaaaaataagcatggaccaatcagcaagcttgtgtgtgtgtgtgcgcctgcgtgttttcgccagcacgtatgtatacatatatgcatatattaaaataactcgcctgagatcaagtcagccattattcctccaagtatggagaagggaggggctcacaaggccccacccttaactgaagagcttttagcaggtgatagcagctgagagaccagagtcacttttcctcagaggtgtggccccagcagtctgcccaggctggagtagatggccccacactcttgcacaattagtgggcaagactaatcgactctgtgggtaataggaggatgaagaggtgacatctgtatttgtgtctgaaattgccagagaataagtaatttaatagtacacgtacacacacctctagatatgcacaatagaaaccgagggctgaagagatggcccagtggctgaaagctctgactgctcttgaagagaacccagatttggtccccagctccctcatggtggctcacaactgggactccagttccagttatgtctgatttgacgcttcttctggcacactccggctcctgcacacacatgcacagtgtacacactctggagtacacacgtacacataaaatgaaaatttttcagtgagacacagcaaaatactgagtggtcaggggccaggtgtatagcgcacacctttaatcccagcactcggaggcagaggcaggtggatctctgtgagtttgaggccagcctggtctacatagggaattccagtacagccagagctacataatgagaccctgtctccaaaagaaaaaataaaagcagtcaggttagtgtcagcttttatttccctctcttttttttttatgtgactctgtaaaaggtgagactccctacctggtggcagtgatcagaggattgaccaccttcagccaccacttctgacacgttctaaacccttagagacacattgtcagtttcagtcaccaatgcttgctctgcttcagaaaggagcctggcgcacagcaggcattcgagagagccacctaagttaataaatcccttcctggctgggcggtggtggcacacgcctttaatccaggcactagggaggcagaggcaggcggatctctatgagttcgagaccagcctggtctacaagagctagatccaggacaggctccaaatctacacagggaaacactatctcaaaacaccaaacaaataaaaacttccttcgtgagttacaaaattacactttgaacctatggaacatttttacgaatgtttctaggacaattctaagagggaaagactgtgcaccttcttctcacgggggaaatctcactcagattcaggacctgacctcgcacaggcagagctacagggggtctggccggcagtgctgccatgaatactatgagggtgtgtgagttagatacacacatgataatcctcccaaaaggaggtgtcccggtggtagctgtccttgtcatcctttttcattccggtattaaccagaatctccccaatgcatcgagatcgcattcactttgactagaaacccaaacagcatgaaactttggttcctggtcatttaatcaccaaaagaatctgcttcttaggccatcagatgttttcttctctgagatcagattcccatgggggaggaggtggtcaagcagtacggtgcatatgtagagatacaatccatgtatattgattatatatacaaatctgtgcacttccctcatgctagtactgccacggttgacacgagctgccaggcacacaaacgcctgtgtggtctttagatggtgctttcttagcaatgggatgttggattgtgtcaaaagggagcaaagcctaaccgcctaccacccaatccgacgnnnnnnnnnnnnnnnnnnnnnnnnnnnnnncaacccaatcttacagaggccttttctcagttgaggctccctcctctccaatggtaacataaaactagccagcacatatgcaaacctataaacttaatctaagacaagtgtataggttctgaaaaacctcactgttgtcagactgggtatgaaatactgtttactgaaattattttacacattttattgccttgttgaacaccaattcccatatgtaacttacattagaatgacttggcttataaaacattgtaatacataagtctctataaatacataaaacttaacagatgacccaaccacacctgagatgcacactgctgtccggctgtggtgctcttcaagctgctaccttattgcaccaaacctctcactgcctcgggacagcagaagtctgagtttaggaaccgatagttcagtggctcacaaaggcaaagaaaacaaaacgcagaagatgaaatggggttgatgacaccacaggaagaaaggttaaaacaagggaccaacgatatagagattcacactgactcacccctgggaaaaccatatgtttgacatcatatattgtacacagagacgacataaggggacctccaaaatcacccagccaggaagagtgccaggacagaacagggccaagtgttaagtaaccaggaactttccatcctataaaatcttcagagcactgtggttggtgactaggtctggagctaagcacctacccctcccgttcccttaaccacgctgccttcttcaaaacagcgaagaacatgagatgcaggtatctcttcctggctgagcagacataaaagggagatattcttagaggaaaaagttggcaagagaagttccctggccagaaaaacctctgacaactgcagagtgattcccacagtcatgattacagctcaagaagctgtgcatttccagaaagctggatgggtggaagctacctcgttaaagctaaagcagctgagtgttttttctgagtcagtccaagaccagggtgcgcctaggaactgccagaaagggacgagctgagaagcaagacacttcccaccctcgtgtaactcacgcagacaccaagcttccagaattttccaatagctaaatgtaaacacaggtgatcaaaaagaagctgtcatcccaaagacgcacctctgattgacgtgggaagaatcaaaggcattaaaccattcctaaagccaagcctagcaggatgggccgcctgccccaggaggtgaaggcagggagttcaaggccaacatccataatgaggccaacctatgacaatctgagctcccatacttacatcagacactgtctcaaaaaaacaaaacaaaaattatctcaagtgttgcttatgagccaagccctgtcccgacttctgggtccacccatggtcatgagcatgagcataccttgaggtcaataaggcttgaatttttttttttttttgaagttttgcaattcttaacacaaatctaatcttttgacctcggtgaagggcaaagaggagcctcctccattccacaggcgaaacactgcaacactgctctgttacacacatcacagaactgcctactttcattgggtttttcctctgaaaataaaactaacaactcagagctggctgtccttaacccttcatacgtggaagagtgtctccaatatcagcccttcgggggagaggacagagaggacaaagcagaacccctcccaagcacacatgcgtgtctaaagatgaaggaaaggaggagctacaccattatcttcctagaagatctttgtggtctgaagctcactgcaaccatctgtaggtagactatgtgtgcttttcttctctctctatttcaaagcctccataccccacataatatatatgaacatatgcatttcttagttttagatgcaaacatatgtatttcttttttgtttgtttatgtggggaggggagttaagacaggtcttatgcagctcaggctaggctgaccttgaactcctgatcctcctgcctccgcctcccaagggctgggattacaggctgcactgccaaatccagcttcacgttgtaatttaacacaacttaagagacaacgtggagcaaggaaagagttgagaactctagagggcccaggactggccatgataaaggctttttggaagttgtatacctcacttttagaatttcacatctgagaacgagagttttaggaagacacggtgaagggaagcaccgttgtccctcgggcctaagagccacaactgtcctatccctggagggagcagctgtctcggccacacttgctcctttcatctataaagtactttccttctgtgctgacaccaaacagattcctctggttaagaaagaaaacaggaagcgccactttcccttcttttcaaaacagcctcggggaaacacagattctaaggcccttcctgggggcctcctacttcgaagctcctgaaggcaaattcactttcagagccaactgatgcttccaccacctgaaagtgaagttccaggaatctaaggtacagagtaacgactttcaatcttaccagttaactcactgatacatgcaagcaccagaccttcactcttctttacggggagtctgtcttcctaggaacagcagtatttgaatttggtaagtgtcttagttttagggtcatcattgttgtgatgaaaacaccatgaccaaagccacctggagaggaaagggtttgtttaccttacatttccacatcactgatcctcactgaaggaagtaaggacaagaacacacacacacacacacacacacacacacacacacacacatgcacacgagtgcgtacagactcctggaggcaggagctgatgcagaggtcatggaggagtgctgccttctgccctgctccccatggcttgctcaggatcttgctttcttacagaacccaggactaccagcccacagcacagtagggttttcctaattctctccaagatagaataatcttctactccctgtggatgtgaggagaaatcgccatcccttgagaccatttgtgctccataactaaatattatatgtgtgtatcactttatctggctttcatatttcctgaaggtggggtaggattacacatgcatatggcctgtgcctgcaagtgtggaagcccccatgtcttcctccaacgcgccccactgtgtttttgagacaggctctctcactggagctaaagttcacagattaggttagactagctgccatccagccctgggatctgcccgtctccatctgcaacatccactcacatcaacgctaagcttacagactcttgccatgcccagctctaacaagggtcctcacgcccgcacagtaggcgctttaccactgagccatctccccaacccctcgcattcctttcccttcaatggattttttagattttaatttaaatgctgcttttaaggttcactggccttatcgttgtgaagatttcccaccaaaattctaattaaaaaagggacagccttccacagtcaccacatctcacaggcacttaccaggaacaagcagattcacaagagtcaacctctctgctaaaccaaaacttccagccttcctcatttacgctgttttagctttgggcattaagtcaccatgccatccatcaatgtcatccatcattataaattagatgagaaaatacacacagtaggagacagacaagccttcaaccgtgggtctgtaaattgcacactaaggacattgtcactgaaaggccacaaccgtggaagctggtggcctctccctccaggaggcacagagattagcatgaaggataagactccttcaaatccttcctctgctcctgtctgaggaaggcctgtgaaggggccatggtgtccaagctcactctggactcagtgtcatcaacaaaagtccctgtcctttactagttttcttctggatcagccagagagtaacagttatgagagacccgtgtcttctctcctagtgttccacccttcaaagttaagttagtgacatcacatgccctcacttacctgctttattttaagtatacctggccacccagcactttgtcttgttaattttctaaatgggtttttatacagatgtgagtctttgtctgcttggaatgtgcaccatgagcctgcagtcctgtggaggccagaggggcatgagatcccatggaactggagttaaagacagttgtgagctgcctggcataaggaggaaccaacaaacccaggtcctctacaagagtaacgagcacaacaagcactttatttttttagctttttgagacatggtttctctgtgcaacagccccagttgtcctggaactccctctgtagaccagactgacctcaaactcacagacatctgcctgcctctgcctccccagtgctggaaaaaaggtgtgcctgtgccaccactgcccagcccctgctgagacatctcttcagcccttaagtccttgattttacattgtgtttattgatacggggatatatttggaaagcagaaataattggctctctaaaaattaaaattttacttatttttattttaggtgtatgattgcttgcctgcatatatgtttatgtaacacgtatgtgccaggaggccagaagaaggcaatggatacctagactggagttacaggtggctgcgagctgccgtgtgggagctggaaaatgaacctaggtgctctacaaaaacagcctgagctcttaaccgctgagccacctctccagcctctagctacaaaactaaatagcttgttttaggtggttattttcaaactacactacaatcacagcacatggggcaacactcaggtcttctttatttcccccatttaaagcaagaaataaagagaggaaatgcggtacagccttaaacttcactggttgttaaaaataaagtaaaataaataaatactaaaccaaaacataaactggcccagctgtgtcttcaaagcccaggaatcagagaacaccaaaaagaaaatcacactgtgtctaaatctaggcacccagaaattcagggaatgcaacctcaagtgaggggacacagagcgtttcctgcagaagcttccggtcactgtctcaaagttccaagactaattaaaaaagaagaggtcatgaccttgagagggacatgggagtagggagagggaaaggtaaaaattatgtcaatatagcacccgtgtatgaaatcctcaaaaaaaaatagatagttttttttaagttccaaatctgctaaagaaaacttaggcaaggtttctgtcaacacttaggcttctgccaaggggctggccatgggacagcacacactgccacactcgtggaatttagattttagacaggcagggaagagctttccgttactatgatgagctgcaaagaaagggaagaaagacataggcaaagtgaccagtccatgtttcatagcacaggtaagcacatacacacacacatgcacatacacacacacacactagaacacacacacacactcgagcacacacacacaaatgagaaagagaattaaatgctgcatgaacaataagcttttagaaaaacgctgtttctcgaactctttccactttaacagtgaggtgtcaacatcactgaccacagcaaaccactgggttccctctgcaccctccagcagagtccctgaaaacctttcttcactggctggagacaaagcagagctctgaagactgaggcttcccaggggctgagaagtcagtatcggaccactccccatcaggagaccgcccctaaagcaggtctaaaacagagcccaggggcagtgacctgaaagagaactctgagaactgagtaattggtggctgcagagtttcctaaggacctagagaactcagccttctgagggctgggggctaaggcactggccacagtgggtgtgaggttaccacagcttgctcaaccccagagtcccgccttcctgccaccagccctgactgtaggatggagaagagctcttctcccactctggtgctgaccacatcccgtttgtagcccccgaagctcatcctccagcctcaatgtcagctaaaaaaatttcaactctgcctaagccactgcagcatcggtcgctttgtgactgtaccgtgtatgtactgattctagggcttcaggcactcatcacttctgggagaaagaagaggaggaaggaggaagctaccagcagccccaggtggccatagacagagtacctgactggaatgaggctaacacctgcggtacagtggccaggggccctgagtttggatgcacacttactgttactctcaccacaaaatcctttcagtccagtactctgacgggtctcccagtgggtccaggtgggtctgaggcactccctctcctggtgggtgggagtgagactagcacaatgatgtgagcggacttgcagttgcttggtccactgggggccagtccacctgcctgcagtctccaggtcaggagattccagagtggacaaacagatgtcaagccaggaaatttgactgggattttcttattcttgtgccccaaatcatatgtgactaataaaattagcgtcttcagatatattcatcctttgccatgcctgagagtgtggcagttttcaaacccaatcttaccaccagttaatcttgggcgcgcctaccagcagcccttctgcttcagaggcccataagaaatgtgaggcgtgagccaatggaaagctgctcacagagaagttttcgagcaagattttacaaaatgctcttaccaggtctcaagtagctcaggctggcctcaaactctctacatagcctgggctatttgagactcggtgaaagcatgaccttgaacttctgatcctcctgcttgagcctcctgagtgggaccacaaacaggcaccacacctggtttgcatcttgcatggggatcaaccccaggcctttgtgcacactcagtaagtactccacacagactagctacatcctctggcccctttaaagcatttccccaaccactgccaaagcctgagtgacatttgctggttgggtagctctaagagacaggagtaaaatcctctcaaattttgtttgatattcacaagtgtttccaagggaagtattataatttgattagttgctatttaaaacttgacccactttttcctaaataaatatgtttgtaaactggctaattatcttatataaataaatgcttttgctcatccctaacagtagcagaagtttgatcagaattcccaattcttggccaagctgaaagctcagagataccgggagggtggggggggtgattttttttaacgtaatggctgcaaacaagtgcattttgtctcaataaataaaacaaaacaggagccagccagatggctcagtgagtaaaagcacttgttgtgaaagtctgcctgccaaagttcaagcctaaaacccacacagaggtagaaagagaaaaatgaatccaccaagttgtcatctgacctctacacacgtgctatgcccacacacctagacacacaataaaaggataaagcaatacatttaaaatgtttccttttgttactatattctggtagggggaaaatattagcaagcaaaaatccttagcgttaaaatgtaacaaaacttgaaagttctagccataggaaatacagggtggagatgtgagcatatgaccgtgtacacaccataagcgaagttattattcacactcatacatccaggtgctttccagtacatcagaggataatatgcatcaaaccagaacagaaagataaacccaagcactggcaatttagaaatgtacactggcagcataaggaagaaaaaaaaaaagatcaaaaccaaaacaaacaattgataaggcagcgtgactttgaacagctaagcaaacatcagctcacaatatggcactacttccagcacccctggagtgtgagctcaggtcagccgctgcagagggattcctgcaaatgatcttacaaagactaaaagacagcgtgcacttatttcactgctcaggtgcctggtgctataggcctgttttacaagtgttgatcatagctgaaccccttagtaaggtgagatactgacctccttacaggactagcatcccattttacagataaggaaaatctaggtgtcagggttaaataacatctgaggatcacactgtgagaaaagtaagtagaggcacaatttgaaaccagacttgtctaaggcagaagtccagatcatctgctacagcacagggcattgatacaatgtatttcttggatgtgttctatccgatggatgcttggcaagaccctggcaaggtaactacaaacaaacctaatgtagactccgcccttttgtttaaatctaaaaggagaaaaaggacaacccaatactcacagaaatagaatcaagggctaggaagacggctcagcagggagagtgcttgccatgcaagcatgaggacctgagcttcaatatttggaagccatataaaaatccaggtggccagcaaactggggacggtaatcccagcactgaggaggtggaagaggcaggaggatgcctggaattcaatgggcagctggtctagcagccaatcaccaagctccagacgcagtgagagactgactcagtctcaaaaaccaagagggaaagatgcttaggaaatacacttgacatctacctctggcctcaacgcaaaggaaacacacacacacacacacacacacacacacacacacacacaccacacacacacacacacacacacacacacacacacacacacacacgaacattcatacaccacaccagaaaaggaaaaacaaaaaacaatgaaaattaaaaccaccactgcaatacactgtcctcacacagtctggagatcagaaacaagtcaccgctgacatttgaatgaggagcagatgacaggcaggcaggtaagaacggaaactgaccaggcagtggggaatgcatggggaacatcctgtggaggatgttcatgcaactgaaaagaaaatcagacattctacctgagtgagcgcaatagcacagaacacggaaaacatggagtcaagtgagaactgatgacacttttatctagatgtgagcaaataaaaacctcactcaaatctgtatgtttagttttcagggtaccagagcctcagcagcagtggtgggtgtccaaattcccaagtttttcctagatctaaagtgaaacagagcaaaggctgtgtcccttcagtgcctctgtggcaagaagcttggttcagactctctctctctctctctctctctctctctctctctctctctctctctctctctctctctctctctgtacctgtccttctccttctcagccactagaccaaacccaactattctagagcaaaccctgactgttctaaagcaactgtttccctctcctgcttacaaatccgtctacagatgatctaggaaacgcactctggcccttgaccacccactatgtgccaccttttcttaggtgaaaacagcagaggcagacttaaggccatctggagagcaggttcctttcttggagccttggtaacgtctgcagggcagctacagtggcctcatctctgtggcccaagatgctttcttcccacgctcatgctgcaaacaccttttcagagtgaggcgctaaaccttcctcaaagggcatcctcttcctctgaaacatagtctgtggtggaaaagaggagtagagggagggtggggggagggaaagggagtggagagaatgtggtctttatcctgaccacccacaaatgtaagtcctctgctagtaagaaaatggggaaaaaagattttgtaggaataaccagatgggtctgacattaacatgcattttgttacatagatttccaattacacgaggctgttggtatttctttagaatttcttagaatacggctggagaaatagctcctgtcacacaagcatcaggacctgagttcaaagtcagccagaaagaaaatctgagtatgtacaaactacaaaacaatttgaaaactaaagcagtactatttaattgccccaggttccagagacaaggtggacagcacacttgagggtcatgactggcctccaatgcaatgcgtgcatgcaggagcacacacacaaatattttaaataactaaaataaagatgcctattataacccctgctttgaagaagatatctcggagagatgctaagctcttcttattgtctttttattttttccactgctgaggagcaagcctaggacatgatccattcttcagagtgcggttatgaactaacctcctgggtgttcaccgcctaagaaattaccgcctgacaaatttcctctacaacacttgacctaaacagatgctgattctgagcctctaaccagcagaaaactctctatgcttccaacacggctggaggcaagctcttcccgtctctccaacacaaagcaaggactcacaagtgttccaggcatgactgacaggtaaacagagaaagaggcaaataaaagcccttgctcattagcccggttttcatagagagctttgactcttggtttgacttaaaatgaatgtctcttacgggtctgtcatcccaagtcaaggcagagcatcctaagaatccaatcccttccactacctttcctgctcttagaaaacacagccaaagccaaagccaaagccaaagccaaagccaaagccaaaaaaaaaaaaaaaaaaaaagcctgcagtacaaatgtttaagtggtcatgtccctgatattaacaatgaccttgaacgctctctaaacacaacagacctgttgctaaatcattaacttatttggattaatgctttgtggtggggacctggacagctgattttttttttaagttatgtttacaaagtgcaacttttttttttttttttttttttttttttgtttttgtttttttggttttggttttggttttggtttttcaagacagggttttctctgtgtagccctggctgtcctggcactcgctgtggagaccagactggcctcgaactcacagagatcctcctgtctctgcttcccaagtgctgggattaaaggcatgtgccaccacatctggcaagtcaaacttaaatttctaatattaagacgtttttaaatatctctcatagaagatcatcgcatgctagaactaggcaattaaataatattgctttagttatcaaatttttttggtttgtacatatccacattttcttcctttcatccctattttacatgtatgtaataattagtctgtgtattaaactcaagaggcttcaagaacatgagtcaatacagtgctagggagcttcaaattcttacacatgggccaaacacatcaatggatataatcaaaatcagaaagaaaaaaaaaacagctatttgtctctttaaattgaaatatttaaacgcctctcattcaacatttattcttgaatattaaaaataaaggttacaaagtgaaacacatcctgctattttttttttctaaagttgcatgttaacacctgaactgttctctgagtttggtatcaggaagttctttctggacgagttagagcaaaacaatctgtcctaggagaattcttcattatccactaagacaaagggctaatctcagctaagaaatagactgggaggtgcttacaaattcactcttcaagcttatagggacaaaactgaactgggaagggatcaactttcgttcactgtggcggcagctacaaaccaccaaagaaaggtcgcatgcattactttttctgatgtaagtttgccacggctggattttaaagacctctaacagcaagatgggatggcaccagttactgtgagaactcccctactctaaattctgtctgtggatctcaaagacttcgtaagaacaattacactgatactttccccccaggaagaagttggtcttgatagacacttagctaccttaaagtacatacatcccagtgtaactcacctttgttctttggtgacattatgacataaaataagccagtcaccaaagggttattacgcaacctgtcttcatgaggcaccttgaataagcaaattcctagagatagaaaggagttcagaagttaccaagaaaggcaaagaggatgcagacgggacggagtctctgacatatagaagccctggctgcctggatatactcactgcccctgagctgatcacacaattaaggcagccaagatatcaagcaatatagtatatagtatatgtactatatcataatttacttcaaagggcctacatgtttactacagctttccttgcctgcaagttgtggcatttcacgaaggccatggcctttcctgccatggcccatgctacactgccccaggagtagcagaaagcccagcttagctcggtgatactagccggatctgggcagtgccactgccttcctgggcatgtaatgttccaggtagctttttctgttgttgtaatgccatgaccaaaatcagcttggggagggaagagtttgcttgagtttaaggttacagcccaccaacagagagcagaattgtggctattaggcttcaatgtgggtcttttagcaatggggaaatgattggtttaaggatataaaattacagccgggcgttagtggtgcatgcctttaatcccagcactcgggaggcagaggcaggtggatctctgtgaattcgaggccagcctggtctccagagcgagtgcaggataggctccaaagctacacagagaaaccctgtctcgggaaaaaagcttcaatgcagatcttttaacaatggggaaacgattggtttaaggatttaaaactgcagatggacaagaggcatggattttgtggagtcttgaggtctactgagagcatgataaatatggttgataacaatatgctatattttaaaagttgtgagatagtataagtgttctcaaaacaaaaatgagtatgtgtgatataacatgttaattggtttaatttagccatgccattgtgaacacactgtattatgtatcataattgtgcatgactttatgtatgagctaaataaatgaatgaaaaaatcaaaaaaaaaaaaaaggttacagcccaccatcaagggaagttagagtaggaactcaaggagatgcttgaagcagaaaccaggctcatggctcggctttattgatatacaggcccagcccacctgcctagagatggcttagcccacagtgggctgggcattcttatatctatcattaattattttacagcccccatcatcatgcccacaagccaatccgatggtgacaattctttaattaatcttctcaggtgtgtcaagttgacaaccaagataaaccaccacaagtaatgactcctacctaatccaaataattctactagtccataatctaaaacaattaacatgaaagacaggggatacataactgctggaccccatgcaaattcatgatgctattcagtgaggagattccccctccctgttcagagccctgtggccatgcttctcacctctctatggctcactgggaaccctcctttcaattgccttgagattcttcaatgtccttgggggcatttcctgctcttgagctggccagggatggtttctgtttattgccaacaaagagcctaactcagccagtcattcaatgttccagcttcatccagtgggtagcgtgagagcagtgtgatagacaaattccttcaggtcttttaagatcagacagtgagagccgggcacaaggggtatccataaactgttacatgaggttaccaagacaactcactgcaagattcacaaatggcttaattaaatatggatggaacaggaattggacgccatctccctctcagaaaccttgggaaattagacacttcaatctgccagtttatccaggcaatgaacaaccttcagggtagtttaaggttccagtcttttgctatatctgcttattatttggccctttggcctttatgttgagccctgaggatccaggnnnnnnnnnnnnnnnnnnnnnnnnnnnnnnnnnnnggcagggaaagctctggctgatccctgaaagtagccgcaggggctctgctggggacttctctggggctccactgtccattaacaatgactgtacgtaataaaagtcccgagcttgataatcagcacagaaagaatttttttctgatattttaacagtgacaaacatcttacttcagataggacctcagtaacgagtgtctgaattctaagaatttagataggagcttagattacaccctgtcgacttccctcgccctcccctgtgctcatgtgaatccgtgatcttcattgctctttacagtagcaaaaccaagaatcaggaatgagaggggcagggggactttaagtcaggtgtggtagtacacgcctataattccagcactcaggaggattgctccaagtttaaggccagccttcaccacgttttgcattccagcccagccccaactacacagcatgagactctaccttaaaacaaaacaaaaccatcattttagatgaaaattcttttcccaaagctcccagggaagctggagacaatcaataggaggcaatttatagagaaaacaaccactatacaaccctggggttggagacccggagaactgagtagaagcctggaattcatggagtgggtgcactgtctaaagacactccagatccttcctttcttccttccttccttccttccttccttccttccttccttccttccttcctgactaggctcccaggtcccagtgtcattgccatggatctctgtaaacccaacacatgcttcagtgtctggaagatgtcatgacagttgcagggggtctaaaccaagctcaaatctccctatcgggtgaagcatgaaaaacgttttcaaattgttcctcaatctctgctggcctcaacaacatcaaaatatttgctttgggactttgagagctactaaagtgaagaacgaatttttgctgacttctgaaaagtataccaagacaatgtcgagaacgtgccattgaccatgggtgtcacaatggtataccaagacaatgtcgagaacgtgccattgaccatgggtgtcacaatggtataccaagacaatgtcgagaacgtgccattgaccatgggtgtcacaatggtataccaagacaatgtcgagaacgtgccagtgaccatgggtgtcacaatgacacagaggtccatccatgctgagttgagctcacattgtacctcctccttgaagccccttcaaccaggtcagaccctcgggacaggaagaaatgtggctcttccaagcccctgtgacatagtttctaaccttcacctggcatttgacagggctcttcttatcccatctcctctgcccattactgaatccgtccacggctattcatgaaacacctctaggggcttcctagagtcctcgctctgtctcagaaattctctgatactggaaatgaaaggattcaaaagacacaaaagtgcctgttggtttctagtcctgagagcaaaggtgttgggtgtgtttatgtccccacagatccccaccaaatgtcaaactacaagttctcaaagggaagccagcttttaacaaaaggatttacactctgtcttcagtatgaaagcccagcctgtcataaaggctcaatgacaactaatgaatgaatgaagccaaccagctaatccataggacatttcagcgttaagtactttctgaggacagtcacatgaactgggttcgtgacagcatatttccagttttatcattaaagattttctttgattctcaacagcctgctattttaactcatcctcaattcaagattgaagatctgtggatgagtaatgttctacagctattcttaaccatttattgattataatttggatagtgttcactcctccatgtcgaaaatagtcaactaaaacgctcctggattatctcagtcacgtgccaataaggcactgtcacaaactgaggcggtagacactggtccagtcaacaggagacccgtgcttagtatgaggattactgacacaaccgatgatccatgcccacacgtgtgtgtcttacctgcagaagtacatcgaaaataaggcagattgcacagtcgctttaacaaaataagtcaggcatcataaccgttcagcacgtctgctcagacaaatgtttaccatgctacactttaaaaacataaatagcaactaggatccatgcttaaataataaccataactgtgctgtgttgcctaatttgaggttttcctccattgactgtgactgggaaaatgtttgtatttttcaaagtaagcactgttcatgaagagtaataagaaactaaagaatcgggctggagagatggctcagcggttaagagcactgactgttcttccagaggtcctgagttcaatttccggcaaccacatggtggctcacaaccatctgtaatgagatctggtgcctctgctggcataaagcctgagtgacatttgctggttgggtagctctaagagacaggagtaaaatcctctgaaactaaagaatccttagatactgtatggaccctgtcccccccaaatgcattacttattaattaagtgaaatgtacagttattgtttgccatgtaaacctgtcatattaatccatggcttcgtctttacatctgcctatgatgcatgccctgcatctgtgatggagtgtgttgagtttaggtccatagtcttccgtctgcatcctctctgttgtttcctcactagtcacacaggaacagtccaaagggagcaaccgtgggaagagctgcagttcctcagacctcaataataagcctctgatcttgtctctctccaccaggtgctgggcatgtgagacagcatggcaatttacctactgagctgctgatgcgagcgagagtctggaagctgtgtgtgagtcaccagggacctctgggtttgagacagcatccagggctggagagatttcccagtggttagagcactgggtgctcttccagaggatccaggttcagctgccaacacccacatggcagctcacaaccatctgaaactccagtccctggagatctgataccttcttccggtctctagtggcatcaggcatgcacatggtacgcacgcacacacgcgcgcacacacacacacacacacacacacacacacacacacataggtgctcacatatacatattaaataaataaatatgaagttgttgtcaattttaaaggtgtattgagaaaagccaggctatctgcatatttgtagggaagaacaaagcctaccacttgcagtcctgttaagggaacaactgtaacgataaatctttccgccagctgcccgagtcccgccaacatgtgggcgcccaaaataacacagagtcttatattaggtacaatgttgctggccaataactaggatttcttacttgctaactcagtcttaattatcaaccataattattaatctatatattttataaaggcatcttatcgaggacaccggccatatgtgccctctcttgctggggatcacatggcgactccacaaagaagaggggggagaaagagagtgatttcctgcttgtccctgcttatattcagagtctgcctgctatgtcacttcctgccaggatcacaagacttctctttactacgtttcccagaatcctcctggactcctagtcccacctatcttgcttccttattggccaacagtgctttattttacaaccaataagataaacatacacagaaggactttccccatcaaacaacttttaaaattataatgggaataacagttaagtaaaaaatgtaaaaagaaatgaatcaaacctacacctattaaaaacagcaaaaccagaatgcttcacaggaaaaaaaaaaatcatgtaggatgtgatgtctcctgcttccatcccagctcttgagcagaatcactgttgagttagggaccagcctgagaccctatctctacagcattaaaaataaaacaacagcaaagaaaagttaaaccaagaaatagaaatgcaaggggccctgattggaacaacataacctgcattttcaagtccactcctggaggaatcggatcagaactggaaccactgtgacccatctcacacatgcccactattgaagacgaaacaagtgactagagatgccagttgaactggcttttgtcactctaagagactactaggactggctgaagtcagattgccaaccactgctcaccaggcagctttctaagcccttaatgtgtggctaccaactatgtccataactggtcatgtattttaggttctcattaggacagcaatggctgaaatgcacacatacaaatgcacatgtgtgttaatgcagacacacacacacacacacacacacacacacacacacacacannnnnnnnnnnnnnnnnnnnnnnnnnnnnnnnnnnnnnnnnnnnnnnnnnnnnnnnnnnntcacacacacacacacacacacaccacacacacacacacacacacactcacagacacacacacacacacacacacacacacacacacacacaccttttcacttcctaatcagaaaccatgtgagtgggcagggaaggaaggacaacctgaagctggttctaccacccgagcaccccaccaccccatgctactcagcccctacctccaaagcacctgactatggatgcagtcagaaacataggtatcttctaggagctgtggcatcaacatggggagagcagggcttataatagaaaataaggaaaaccagaggaccaattgccctgcattggaaactacacagtgcattctcagtcccttcttgcctaaaaaaagaaaaaaagaaaagaaacaaaatgaggaaactaactctaggatacatcatttaaaaaaatcagttctttaaaatatatacactatctaggatgtaaggtaatttttccacaagtcaacacaagggtatataatacagatcttaggtacacattaagaaacatcagctgggtgtggtggcacacgcctttattcccagcactcagaaggcagaggcaggcggatctctgagtttgaggccagcctggtctacagagtgagttccaggacagccagggatacacagagaaaaccctgtttccaaagtataaataccactcaaaggaaaactgggaaacatggatatttgcagccacatgctcaagggtctttaaaccacacagaagggccggtgatatggttcataagtactagctctcacatcctgggatgagttccctcccaggacccaaccacaagggaagagtgaactgaatccaaaagttgccctccagccccacacgggtgctgtgacgctcatgccagcacacacacactcacagagacaactctatgtttaatcaccctgaaaagcttacgagactcattttgtcatagtgctgccatgaggagtgtgttgaactcaaaaaaacagtgaagacccactgcagacactccaaacaacagcctttaaagcttattcatgccataaaatgttaagagtaggcaaaattcatttgtaaatcaacatctgtgctttataaagccagctctgatcacagcccacctgcttccaatcggcagcgccaccaggcttctgcaagtaccagagactgaagaggtaacatggaaagcggagacttgcacggctcacttttagctactccctggaatttggaatattacagtggaacatatgagtttggctaaacacgtgtaaccatcgtgattactgaacctgaactctggcctagttcactccaccagctccttaacctttgaagaaaatttgtaattgtgtatatggaaatatagctgttccctatacattctcacttcacaaaactttcatttgtctctggagctagattgcctcataccttcaaggggaggctatccatcctctccaaggcaaaaacactgaggctgacttacaaaaagatacatggtgtgagcaaggtcatgcaccggttagcagcaggcctgagaaacggacgcaaggagcaggagagcaaggaaacccatggaggagtctctactctgcgagtaatacaaaggcctgtgagtgaagatcagcaacacgtatgtagccagggaagcagctgttgttccgctctggcttcacagccctagagtctccaacaattacaatcacctagctaagacttcccttgtgaggctccagagacaaggcctgctcttgcaggagctggggtttgattcccagcacctacacagcagctcacagccgtctgtgactccagttctacggaacccagtggcctcttctgacctccacaggcactgcacacgtgacacacagacatacgtgcaggcaaaatacccatgcacaaacaataataaaagatgttaaaatatttttacttggctggggcatacacccttctggttccccaagctaaataaagccctacacgttgaaatcatgcatgaaaagatcatgtgtggcgtcaaaataatggaagggaacaagggagggggcgacggggggaagagaaacaaacaaacaaaaatgtttagaaaacagcataatgaagacttcataagctaatttaaaaaaaaaaaaacttccaaaaagttaaccacaaacaaacaataaaaagaacctacaaaataataatcgtcccagtttgtcccctaaaggcccatgtgttaagggtgtagtccttagctcctgtcactgctgggcagggggccaaggtggaaggcctctgtcttagcttgcttttctgatactgtgataaaacactaaccaaaaagcgacttaggtttatgtggcttacaggttacggtccatcctcgagggaagtcaacacaagagttcaaggcagaggcctggaggcgggaactgaagcagaagtcacagagaaatgtgtttggtggcttgctctccctggcttgcttgacctgctctcttaggctccccaggaccacctgcctggggctgactccacccacagtgggctggactttattaatcaagaaaatgccctacagtcttgtccacagagcaatctgacagaggcaattcctcaactgacattgcctcttgctaggtgactgtcatctgccctaaactgacaaaatctccagcagagcctctgacctccacatgtgcagcacacacacacacacacacacacacacacacacacacacacacacaccacacacacaccatacacacacaccacacacacaccacacacgtacactcacacacaccacacaccacacacacacactcacacaccacatacacaccaacacatatacacacacaccacacacacatatacacaccacacacatatacacaccacacacacaccacacaccacacacacacactcacacaccacacacacataccatacacacacaccacacacatacacacaccacacacatatacacacacaccacacacacatacacaccacacacacatatacacaccacacacatatacacaccacacacatatacacaccacacacatatacacaccacacnnnnnnnnnnnnnnnnnnnnnnnnnnnnnnnnnnnnnnnnnnnnnnnnnnnnnnnnnnnnnnnnnnnnnnnnnnnnnnnnnnnnnnnnnnnnnnnnnnnnnnnnnnnnnnnnnnnnnnnnnnnnnnnnnnnnnnnnnnnnnnnnnnnnnnnnnnnnnnnnnnnnnnnnnnnnnnnnnnnnnnnnnnnnnnnnnnnnnnnnnnnnnnnnnnnnnnnnnnnnnnnnnnnnnnnnnnnnnnnnnnnnnnnnnnnnnnnnnnnnnnnnnnnnnnnnnnnnnnnnnnnnnnnnnnnnnnnnnnnnnnnnnnnnnnnnnnnnnnnnnnnnnnnnnnnnnnnnnnnnnnnnnnnnnnnnnnnnnnnnnnncacacaccacacaccacacacacacaccacacacacaccacacacacacactcacacaccatacacacacaccacacacactcacacacatacacaccacacacaccacaccatacacatgccacacacacacacacacacactcacacacaccacacaccacacaccacacacacacacacaccacacgcacatacacaccacacacatatacacacacaccacacaccacacacacacaccacacacacctggggacaggcgatgagtcactggtggcatgctccaactctgtcccctgctcacagacacctgccatctatgccattgtagttccaaagcaacagaatccatagactgtacaactgaagccaaaactgtgagaacaaaaatgtctcctccttgcaaactgataatcttaggtattttgatataacaatgggacactgcccatatattccaggaccttaattaagccattataaaactaaacgtaattatttctcaatagttgaaaattttcactcctgaattttgaaaaaaaaatttgtaagacagaacccctagttttaaaactacatattaataagaaaaatcaatgagatgatttgctgtacaacttaagccccatcagatgtgccaggcattttctgaaaacatctttgaagtttctacattacttgcagatctcacacacaatgtttatattgataagataattaataatttcaggttgaacactattaggtatttcccaaatgtgaaagaaatggcatgcttttctaaacagaaagtactgataaaagatgtcaggacttgtcaagtaagatgccgaaggacctttatattcccttacttcataagacttaaactcatgcagcccactgaagtccatgccctgggctgccctggagtgccctttgaacaccattctccaagggccagaaaattctatctgggaacatcagcaatgacttctgtaactgccctttgaaaacctgttgataccggagtgcaggagtgggggagcaatcacactaacgccgacctctgcagttctatgagctacctgaacctccgagacgtctacttcaatagacagacatccaatcaaagctgcaagctccgcccagggcagcatgttcaagactcttcaacttggactctgacttgccagtcatctcaacactattatttcatgaatagagaatgatagccgtctgggaacacattctgaagaaactccactttcagatcaccagcaagaaaccctgagcacagcgagcgctgtgacaccactgagcctgccacagtcactgcattcgtgctggttttctgtctgaagtcacttgggaaagcagagtagcatacgcttggcaaggagtcgaagtcaggagtagagttctggctttggacacaaaggccctctgcttcttgcagtggtcacgactcgtctcaacaattcctggagacaactccacgactgtggaagctggaccaccttagctctcccagtatctgcttcatacactacccacctttgaccttgcagagtgaccctacagagacaaagtccatcctggcccttgaactcttgcctaggctatgcagcgataattactgcatcagctaattaactggtgaatgtagtcattacagctctgccatgctcggcgcttacctctttgctccccacgcccctgtgtagaaaccactgagtcccatttttagactgaggagttggaagcctagctagatttcataacctgcccagggacataaggtttgcaagtcaaagggtgggaattccagcccaacccttctgtttctagagcccctccttttagctgctaaatggcagacaccctccatgtctgccaaggttcaagtgtaagttcaacagaattcgtcagcaaggcactgtcctggacccaaactggacttggagcatgaattctctcagaaacggctggacacttgcactgagttcttccacacttcaatctccggagtaaactgatgggcaggagatatggaattaaatctaccttcctcccccaaatctgtggggacatgctcaaagaacaggacaccactggtgacttccagggaaggcattgggcaggtgacactgtcacagctcaggagacagaactccaaaactcaacagtgaacagtcaccaatctcaagtctcccagattagagtctaaagagcggaaactcacctgtgcactaaaacatatcgcaaggcgcaactaactgcatcagctcgccatgtaaggaatttctagaaatcagaaaaggccctacttaactagcacgctggtgttctgcaggatacacaaacctatttccccagtgcatacaccaactggaatctccagagccttgcagttcacttcacccggccgagggggatggagaggaaaaaagaagatcccagttctagaaccccggctgcccacgaggcccgttttggcagagccaaaggggtgagtcttcccttggcaaggccaaaaggaaattacttcagcgaagaggggctggtgatctcctccagcgggacaatgccgcatttgcactgtgcaacatcgcctactttcgtggccgaagccannnnnnnnnnnnnnnnnnnnnnnnnnnnnnnnnnnnnnnnnnnnnnnnnnnnnnnnnnnnnnnnnnnnnnnnnnnnnnnnnnnnnnnnnnnnnnnnnnnnnnnnncgccagggaaggctgcctcgcggggcctgtctggggcgtgcgaaccacttcctcttctcggatgtgtctcgggctggagattacgaagttgctgagaagcgctcgcggcttcctgagcgcggggacctcggggacgcggggctgtcccaggcgcagaccccggacacgccgcgcgggagggacagagacctggaccggctggcgctgcccagtgcgcgccctacttaccccagggtgctgatgaagccgttgactgagccctccgcgtacagagacacgatgtccccaatgtagaggaagctggacattttgtcagacatgctgcttcacgctcccgtggccgcctccgctgtctccgctgcgcgcaagggtgagatcgggcccggggggtccgaggagtcggaacggctcagccacggcgcgcggcagcgaggccactgctggggtcaccgcgatggccccgcgccaccgtcgccgcccctgccctgccgcccgccgtaggtttcctgttcctggccgagttctgtcctacatgagaacaaaattgtctcctccttgcaannnnnnnnnnnnnnnnnnnnnnnnnnnnnnnnnnnnnnnnnnnnnnnnnnnnnnnnnnnnnnnnnnnnnnnnnnnnnnnnnnnnnnnnnnnnnnnnnnnnnnnnnnnnnnnnnnnnnnnnnnnnnnnnnnnnnnnnnnnnnnnnnnnnnnnnnnnnnnnnnnnnnnnnnnntgtgtgtgaatgtgtgtgtgtgtgaatgtgtgtgtgtgtcgttgcaggggcggccgggaccccgcggggacggaggctctgggctcaggagatcttggaggggcggccccggggtgcgcagcaacagtctggggggactgcgggaggggaccggagggaagccgatctatagggctaaacagggacccagccgggctgggaaggggtgcggtgcagccagcgtggaggggaagacccagagcgcgcagcgacagtccctgtttgcgaaaggtagaggacttggaggggaggggtggaggagaattgtcaacccgagggctcgggtggaaacggccaggagggacaccgactgggaagaccttgcggagccgccactctgcgtggggcgggacgtggatcgcgcagtgacagtccgtccggggacagtcgggcgagagcacgagcctgcaagcgctgggggtccgcgcgatgcagcgacctgaagacccctgaccccagctggagtcggggaggatacatgtctgggtggggaagttgttgactgagaggaggcaagggttgaaaagggcacagttgagaaaggtgctaacgggagggatgcagcgctcctgtggagtgtgttcctgggtcagattttcttcaagtttatggctggggaaaaggacccagcagccacagctgccgcggtgaccaacctggtgaccgtcggtgggtctccattggcagccagagttctgcagggctcagctttgcaaccccaggtgaggctaactgtagattccatctccaggagctggtgacagcccttgcggcccgggagatggagacaggacacgggtcgtgggtgccctcactgtccccgctcctgtcagtcgacctcttacaacacccttttagaagtgtctggtcctaacctgtggaagacacagaagaggcgaacaccgtggtggttgtgacactagtcacgcaataaaaaaattactgcccaagcaatccgcatagagcaagggatgcgaaaaggcagagagaggatgggcagggacatacgccaaactgcagctgaccaaaatgcagagtttagtggtgtcattttgccttacagttcaaagatcgttggggctgaaagtgcttagaaagcctaccgggtagcaaagaacagacaggaaatgtcagtgtggagccagcccctcctctcctgggctcagcatgaagctgtccttactcccactgtctctccaccccttttcctctccttgctaccacctgagcccacaggtctggcttctgtgttgtccacagagaacaggaatttagtaatttacagatgccccatacatgataggagtcatcctgtctatgttcatgatgtcagtgtcgggaacctccaaaagatgggccctgagtcctaaagtcttgagatgatggccctagaatggaggcatctgttatccaggggacttgcatgccgcgttctgtgatggtcctccctaacatccagcaggtgctcaacagttgttggcctaaatcccgaaggcttcccttacccaaagtcagggcaactccaacaaatgagtgtgtgaatatttatgctgacaaacagatgaagcatcaggctaggttcccaaattctggctcctagtgacagcctggacccagaatagggccaagaggcccaggacaggagtccagttgccttgggtatgacaccttcatcccaaggcacctctcaacactttccaccttgtctttggttatttctgcactgtgtgtgtgtgtgtgtgtgtgtgtgtgtgtgtgtgtctgtgtgtctgtgtgtgtctgtgtgtgtgtctgtgtgtgtagctgtgcgtttgtgtgtgtgtgtcgtatgtgtgaatgtgtgtgtgtgaatgtgtgtgtgtgtgaatgtgtgtgtgtgaatgtgtctgtgtgtgtagctgtgcgtttgtgtgtgtgtgtcgtatgtgtgaatgtgtgtgtgtgtgtgtctgtgtgtgtaggtgtgcgtttgtgtgtgtgtgtcgtatgtgtgaatgtatgtgtgtgaatgtgtgtgtgtgtgaatgtgtgtgtgtgtgtgtgtgtgtgtgaatgtgtgtgtgtgaatgtgtgtgtgtgaatgtgtgtgtgtgaatgtgtgtgtgtgaatgtgtgtgtgtgtgtagctgtgcgtctgtgtgtgtgtgtcatatgtgtgaatgtgtgtgtgtgaatgtgtgtgtgtgtgaatgtgtgtgtgaatgtgtgtgtgtgaatgtgtgtgtgtgaatgtgtgtgtgtgaatgtgtgtgtgtgaatgtgtgtgtgtgaatgtgtgtgtgtgaatgtgtgtgtgtgaatgtgtgtgtgtgaatgtgtgtgtgtgaatgtgtgtgtgtgaatgtgtgtgtgtgaatgtgtgtgtgtgaatgtgtgtgtgtgaatgtgtgtgtgtgaatgtgtgtgtgtgaatgtgtgtgtgtgaatgtgtgtgtgtgaatgtgtgtgtgtgaatgtgtgtgtgtgaatgtgtgtgtgtgaatgtgtgtgtgtgaatgtgtgtgtgtgaatgtgtgtgtgtgaatgtgtctgtggtgtgtgttacgctgatgtgtgcagatgcaatgatctgtgcatgcaacagtagaggccagggtttggcatcaggatgacctcctcagtcactttcccacctttctattgtgttgctgttgtgtgggaagtttgagggacatttatttgtttgtttgtttgtttgttttgaagcagggtctctcactgagcctgaagcttagcatcagacagctaactgcccagagagtacaagtccaagccccggcaatggggttagatgtgcctgccatcacatccagcttttacgtggttcctgggcctggaactcagttcctcattgctgccacagcaagcgcttcacccacagagccacatccacaacaccccaggccgagtcaccacactagaaatgtcctgagactgatcgctctctgacttctttccaccttcacgggtcctgagggctggcatgtggctgggggcagagcactgaccatgcctgcacaaggccctggccttcatccccagtgccacaaaacagtttgtaagacagattgataaaataatatttgtgggttttatactttatttatttagttagttagttagttagtttttccaaactgagtttctctgtgtaacagacctggctggcctggaactcgctctatagaccaggctggcctcagactcacagagatctgcctgcctctccctcctgagtgctgggattaaaggtgagcaccactgcccagctaataaatgctttatgtttattatcttgaatgaagactagatgttgagaataccaggttaaccaaataataatcagtctcctgtgccactgagtccatgaatcacttagttcagcacaagtggctatcaccacccctaaaaacctatagaggcgataaatcaagcagaatatactatctgaggcattgaccaccaggcattgaatgtattagaaatgaacttctgggaaagagcagaggaaggcactggctcccctggggctagagttagagaccgttgtgacctaccatgggggtgctgcccctgtcactgaatgccatgaattgctttcctctcttctctcccttgcaatgaacataatttgagaaatacagccagcttagtgagcagtctgatttatgagacacatgtaaagtataggactaaaaagtcattctccctaagagcatgataaatatggttgataacaatatgctatattttaaaagttgtgagatagtacactttaagtgttctcaaaacaaaaatgatgaatatgtgtgatataacatgttaattagtttaatttagccatgccattgtgaacatactgtattatgtatcataattgtgcatgactttatttatgagctaaataaatgaatggaaaaaaagtcattctccttcaataatgctataatgaatctacatgtttcgctgcttaacaaagcatcaaggacagcctttgggcttctggtttcttctttttaaaacacgtgctatgggctgaggcgatggctcagctggtaaacagactgccaggcaaacataaggaaatgagtttgggtccccagtacccacataaaatcccaggcatggcaacacatctacactagggaagaggcagtcaggaagactccagaagcgtgggccagccaggctagctgatcaggtgcagtaagagacctcatctcaaaaaaaaagaaaaaaaaaaaagaaggtagagagcagtcaaaggtggtttacattgacctctgcctcacacacacacacacacacacacacacacacacgcacgcacgcacgcacgcacgcacgcacgcacgcacgcacgcacacgcaggtgtgcacacagacgaagaggagcacgggcacacacggcacacacacaagcatggtggcacacacgggaggctgaggcaggaggatcaggagttccaggcccaccccgggttgcataatgagaacttgtcaccaccctcagaagaaaaggaaggtagggacagacatacactcacacacattccggatcccatttaaaatgttaatcttgtctcctccgggccccttcagatgagggagtcagctatgggggaggattgctgtatcagttactttctcttcactttggtaacaaagggtttcacggggacagctgacctgaacaaggggttgttcatggaccccagactgatagctgggaaaccagcttaggactgttccagacccccctgagtgaggatgtcagtttggaggtctggttaaactgtggggcctctggtagtggatcagtatttctccctagtacacgaatggactttgggagcccactccacatagagagaaactctctcagcctagacacactggggagggtctaggccctgctccaaatgatatgacagactttgaagatccccccacggaaggcctcaccctccctggggagcagaaagaggatgggatgggggattggcgatgggcaggggaggaggggagggagagggaactgggattgtcatgtaaaagaagcttgtttcaaaaagaaaaagaaaaagaaaaagaacaaagaacaaagggtttgtttaggcccatgtttgaggttacagaccttgaaagtcgcagcagcagaagtacaaggtggatggcgcttacagtcaggaagcgaagagacatgaatgttagtcctcttgctttctctagcccagagtctggccctgagactgtgcgctccacatggccctcctcagtcacctaacctaaaaacttgcgtgaggtgcgcgcagaggcttgcattccatattctgtcctgttggccatgctcatcacccagtacgagcactgatgtagcacaaataaaacaaaaaaacagaggcagatattggggctaaagctgaagatcagaaaagcaaagcagccaaccgctagagagttctcacctctaccaatgctcacacctcagactgaagggtgagccactgaacctctgattgctccccactgagctgctcctcagtcacacccagacttcaatgagctcgtctcctcccaccttccattcctctctccacccagccataccactcccgtctccacctccctagtgctgggattaaagacacgtcatcccaagtggtaggaacaaagatgtgagctctgtttctcttttagactgattcactctcatgtaacctagggttgccttgaactcacagagatccatctgcctcttgaaaggttcaggcattatgctggcctgcccctgttacctggtgaaacaggcaataccctggtcagcccaaggttccatgggaactaagtctgcacgcaggtgtagaggacccctttaaaagataggcccttcccatttacgctctctgtcctgctctctgtgcgctctgttcccctctctctgtttccctgctctgtctctctatggcgcccagccatggcggtcagccatttacccctgttcctcttcttagtctccccattctgccgggccttataataaacttatagtcttatgtctcatgtctcagcatttctcttttcttctttttaaacagaagaatagcacctctgtctccctgagtgctgggattaaaggtgtgtgccaccacggcctggcctctatggctgcagctagctttgccctctgatcttcaggcaaactttattagatcataaacaaaatatcaccacatttcctctttttgtctaatataaaaaagaaggttataacttatataagaaaaactatatgcagtaagtacaataactatataaaatatatacaggcaataaatacatcaaacaatgtctagtccatttgcatttgacaaattcagagaaaatactctattatctaaatctgtaatatgttttatattatacatttctgttccatatcaggtggcccttctgacatgacacagagattttggattttactttaacaagcatgcttgggtttagggaaggaaagagccatgctccaagtccaaagccagcttaaatttttaattgaactgagactacaaaaagaatatttgctttatatgtctaaagagaacagcagaaacaaacatttgggaagatttatgagatttcatcctgttgtaaatgtgatataacaataagtcaatttactctttttcttgggacttttttttctggatgatttgtcctttttcttcaggtgtctcatttgttcaatggtcttcagattccttagctggatgcctttatcctcctgaaaagagaaaaacaaaactcttcctgatcaaatgaaaagcatttattagttttataggttagtttagattaaatgggcatgctgtttgatgaactatcacctcttctaatcaagaggtctctcttgttccaatataatctttatcaattttgatggtatccatagcttttcttctcctgtggaaacaaaagcaaaaccccttccccaatgtaacacatttcctggtttctattctgaggtcaacacatctttaaagtatacaggctgatttagttctgtagtttattctataatccagcatctctctgcagctgtcattccgttctcattagcattcagaaaattcaaagttaataaagcaatctgtttctgggcttctttactatccctttctgtttgtttaacataccctttagagttcagtttgaccttccaaaactgcctgtgtggtatacctgtaatatgctttatattataataaacaaaacactgtttcattttctcagagacatatgttggagtattgtctgtctttatttgtacaggtatacccatgacggccataacttttagcaaatgtatgattactgaaccagccttgtgccattcccatgacccgtttgtcgagtgagatgtgagccctcgtcacagatgtggtgagctcacatcagcatctgaggaagctcccagctccaaccacggtgtctgccacctgctgctgtgctgtcctcaccattccgtacctttccctctggaccataagcccaagcaaactcctgtaaagtcgccttcgtcgtggtgttctaccccagcaacagaaacataacgggcagatagatgtctagctgccattcagggagtcttgataattttgaacaacagaatgcatccttggttttctctggaccctgcaaactatacagccactcctgggttccagcatcctgaccactccggagaatgggtttagaagctgctccatgaagtcccttattctgtggatggctcctccagaaccagcaacaggttctcaaatatcaaccagtctgatgccccaagtcacctggtaccaggagaatgagcaccaggctctttctgttcgattgctggcattacactctataagtttccatcctccatggaggcagggaaaggctctaccccctggggagagatatggctcagtcacagagttgcttgtctaatgcctgatgctctagttttgatctcagcattgactagaaagatgcagtttcacaaatgcacagtaattaatttaaatccacatgattagctctgtggttgattctctaatacatataaattatttagcctcatgctcaaccacaatccgcccctttgaggtagatcaccaacccgatgcgtggtcagcacctctgtacccacctatcacaccccactagctacagcctgaatgggcttagcacagctgcccagtcctggtgagtcctgaagagactaaattagggtgcttttcaagacttcgtgtgcaacaggcaaactgaaaagcttgttagacacaagccttgttccctgggattttcaggtctggggtgagggttgtcaccactcctgaagaggatggcacattaccagtcttctcactgtcatgacagaacccctgacaagagccacctgaagaaagaaggttcgctttgccttcgagcttgtgtgtacagttcatacagggcagccatggcggcggagcctgagcagctgctcacactgagcttgtgtgtacagttcatacagggcagccatggcggcggagcctgagcagctgctcacactgagcttgtgtgtacagttcccatagggcactgtaaggagacaggagtgttcagggatctgtcttatttcccctttttatgcagtctgatacaccacatccagagtgggtcttctctccactgttactctcgggaaccacctcacacacgcccaggtgtgtctcctaggcgagcccaaatgcacttgacaggaaagactcaccacctggatagctgtgggcagcgcctgggagacgggacccaagcaaaccctgaccagcacaaaggcctcgctgaagacattacttgttcttgatttggttgtggttgttttaataatctcaaattcacaaaagattttttttcagaagacatcaaattcatcaatacttataacttaccactttacaatcagtttagtggctgtcttcacacacaggagagggtggggaatggcaacgtacatctctctctcctgcacaagcatggggtgcgccctgcacagcagtagctcgtttagactgctcagatcctcatagcccatctgttctgtgtccttcacccagaaaaaggattttaaacatggtatctttttttagttgtttatttatttttggttttttgagacagggtttctctgtaggtttttggagcctgtcctggcactcgctctgtagaccaggctggcctcaaaatcacagagatccgcctgcctctgcctcccgagtgctgggattaaaggcatgagccaccaacactcagcttgatatcctttttattaaaaaactattttattttatatgtgagaatattttgcctgtatgtgtgtctgtacaacacatgtataccaggtgcccacagaggacagaggaaggcactggctcccctggggctagagttagagaccgttgtgacctaccatgggggtgctgggaactgactccacaccctcttaacgagcataacctagatttaaggatttatttatttattgggtatgtgtctgtgtgtgtgcatgcaaaggacagaagaatgtggagggtttcctctttgttcaccttctactttttccttttaggcaaggtctctccccgagcctggagatctcctgttctcagctaggctgcaaagcagctagttccagcaagcttccagtctccaccctcacccctggagctgggataaccggtgtgtgcaggaaacctgtctatttctgtggttgctgggatacaaaccctggtcctcaagattgcacataaagcgttcttaaccactgatccagagcacagattggaaactctgcgtgtgtgtgtgtgtgtgcgtgtgtgtgtgtgtgtgtgcgcgcgcgcgtgtgtgcgtgcgtgcgcgcgtgtgtgcgtgcgtgcgtgcgtgcgtgcgtgcgtgcgtgcgggcgtgcgtgtgtgtgtgtgtgtgtgtgtgtgtgtagaaagaagttggacttaccctctgggaaggaagccaacgacagcctggcactgataaatggggcgtgggaggggatgggggctacaaatgagaaccaggttatcaggacagaaatgcatgatatcttcataataaaacccgtcagtttggataaaaacctaaagaattaattttcaatggtgagaaatagtctcccacctgtttcctaggctcacagccctggacacgctaacatcctcattctttctctgaccctggcactccagccctacaaggcctatcgaggaagggcaccaatcagcagcagtacgctaaggagtaacaggagttaccaatttttggaatattttaaagattcatgatcagggcttgaggtctgtatagctcaacgggagagcatttgctgagcattcaggaggccttggttttgatctccagcacaagagaaggaagagaaggaagtgggaggggagggagaagggaaaaagaataaattagaattgccattcatcaacatattaaaaaggggatatcagctcacgaattaactcttgaccaatatttgtgcaaataatgaaccctgggacctcatctaccttatctgtagagtgggcacactcacatggtctagattagaaaatatgttttttaaagatttatttatttatttgtttattatgcatagtgttctgtctgcatgtatgcctgcatgccagaagagggcaccagatcacattacagatggttgtgagccgccatgtggttgctgggaattgaactcaaaacctctggaagaacagtgttcttaacccctgagccatctctccagcccctagaaaatatgctcaatggcctttgtgtggcagagttctgcaccaagcaagtactcaaatagatgctaggtattaaaatgatgagacacacaacaacggacatcacagaaaacccagtcagatgtcaccaccagagacttcttgaacagctcacacacacacacacacacacacacacacacacacacacacacacacacaccagaccatctgtgaacactagcaagcacttgctaattgctgacacgtgagttctttcagggacatctgaccttttaatacaggcaaaagaaatcaattttttttaacaggcaaatggcagacataacaaacgagtgttgtgacaccaaaaattaattaattcaattgaaaaaaataagtggctaaataaccacctagagatgccaagtgagaacactagcttccacaagctaagggttctcatcttatctcagaatggagcagataaaacctcccagagaaactgcaccgctgtgcttgcatctcaggggaaggacggccatgcctacaaactccaacgtggctgtcagtgcccacaaagaatgtcgtttgtccagtgaaggttctaaaataccaagagaggtctggaaagcatggtcccatttccaaggtccctgggggtccctgcactgctcttggttggttccttcaggatttgagcctgatgtccagaagctctcactggatggcgaaagctaacagggagtgacagacttcagagctgaagcccctgtgttgctaggaagaaaccagagtgtgtccctgtgtgatgttcactgtagcaagctttcttgtcagcctatctttggattgccagcccccaaacaatgacatggaaactcattattaagtatgaaagctggcggggtagtggtggaacacactttagtcccagcaatcaggaggcagaagcaggcagatctctgtgagttcgagaccagcctggtctacaagagctagttcaaggacagcctccaaagccacagagagaaaaggagaagtttctcatgttctccaacatagcagagcctgtacccacagcatctcaaccactcatctcctgggccagtgtctaagctagggtttctattgctgcaacaatacaccatgaccaaggagcaagctggggaggaaatggtttaattggctttatgcttcagcattgttggttatcactgaaggaagtcaggacaggaactcaaacagggcagaatcccggaggcaagagctgaggcagaggccatggagggaagctgcttactggcttccttcccatggcttgtgtagcctgctttcttatagaacccaagaacaccagcccagggatggcaccacccaccatgggtggggcccttccccattcatcactaggtgagaaaatgccttacaactaagactccttcctctgataactccatgtcaagttgacacacaaaccagccagtgtagccagtaagtcatctttcaggacatctctatggaaaaagtatatatggaaattcgtgaagcctgttagaactggcatccacccatcttggcagaagctgagtaaggttggcatgcagccctccatgacaaccttatcagagtttggggcctgcttgtttctacatcccacattctgggagagggctgacgctgaaccatggttttggccttagttactgtgtcagattaggcagtgatttggctttcttcatattataatctccgtttatcaaactagagcaggtattgtgttgaacaatcctagcagtaaatgacaggatgctgacagatgaaatgttgacgtcttttaaataggaattgtctatagataggcaaatttacgggcctcgacttagcttcccatacgctcccaaatcggcccatctacctctcaacaatgattgtctcaagacccaggatttctccagtcaaagaaggcctacggtggagaaaacaaaattgtccttaaaaagtcatgtcttcacagctgcttcacacagactttcgtttccccaaagagaaagacacctgcctcagatgtcactttactcagagttgtgtacacccagagacaacaggacaccaggtgtttaatacacacccacttcctcctggaccacccaggagcctcgcctgtctttgtggggcagagctgctgagactgtgaaaacagcaggccaggaacaacgggtgacggagactgcagagccttccacagggaagcatgctgttcctgaaatgcctctctgtcagtcagtcatgacgaaacaccgcacaaatgtaatttgaggaaggaagagtctgcttgggttctgggttggagggtgcatggaggaggatggtgacagggagcacggaggaggaggatggtgacagggagcacaggggagaggcagctggtcactaagcagagtggagtgaattcttctcagctttctctcttctctttatgcagctggggaccccagtctgtggaatggtgttgcccatgtctaggatgggtcttccatcttggttaactttatgaagaaactcctccacaaatgtccagagctttgaatcattggtgactctaagtcctgtcaaggtgacagtccatatcaaccacacgaccccctaaggttctataatttcttcaatcttctataatttcctcttccttctgatacaaagaattgttgagggaccagtaagatggctcagtagggaaatgtttcctcaaactaagccctgtgtcctgtcccttcagcaactttctaatgacctgagtgcaatccccaggacccacgtggtggagagagagaactggctttcacaagttgtcctctgactgccgtgtgcacaccacggcatgcacataaataaatgcaataaaactttaactaaaatgtgtcactgtcatgtttacaaaaacaaaggaatcatttatttttaccatcccctccatatataggcaaacacatttttgtgtaaagacttaccatgttgggtgttatgtgttatgtttttgttgttgttgttgttgttgtttttttggcagccatattaccaacctacactaagtttacatggcattctgacagtttacaatcatctgtttttaagttattagtattttcttctaacaacttgaagctaattattttccctttactgtactcttaccaatctattcttaggcaaaagatggaaaaacaggaagaggcatctcagtgatgtgactctctacccctcacccctgcgtgccacacattccgccaaactgtgcctccctcactcatgatcctgtctggtgtggctttgatcactcacagctgcatgagatacattccatttgaatattcgctcatttcttccctccaaataatggaagtgtcagctttctttgtccccagcccccaccaaagtgtgacattttgaatgtgaaatgcaccccatcccatgtgtttgaacgtttagtctccagcagctggtgtttcagagaggaagtctagcaatagaagtgggtatctgggggcctataacgagagcaaagccgatccatagtccgtaaggttaagatgtctttttatttagataaacaccagccaaacacaagccagagcagtgaggccagggagaaggggcaggagatgaagaagagggggctcccaggtgcccatggtcccttaagagtccctctggcgtcatcctgaccccaccttgaccacgcctgtcaggcacacctgtaaccagtttaggaggtgtggatatggtgtctccctacaattccccttttagtctaaaagaggattaaaacttaatagtgtaaaatatccaaaattaacaatcataaaggtgaaatacaagaagatacaataatctgctattgcacatcctgactatgtctatttcagctaaaccctgaagtcatctgaaagcggtgtccaacctgaacacctccttctaatcccaaccctaaacaataggaaagttattccaaactccatttacactaccctaatagacaatactggggaacaggggtgtaccatcctccaagttacttcctgttgaaatggggcaatggtagccttgtgcggtcctatgaggagaaatgttagtacagggaaagtctctaacagattatatccagtccatgttagatgggatttgcttgattaaagatctaggttgaaatcctcaacttgattgaagtcagttcttgaaactctagtcggagtgtcagctgaaatggagcaagttggatccaatgcagtctaggaggtatggcccaattccttttccagagcatccagggattgctgtcaggcagtcttcattggctgtgtgggactcaagcataagtgttagcagagaaatgtttgcttgtatatgtaagtatgctggaaaaggcaatcatggaaaagtaatgattgtgagacagtgtacaccttgaaggaaagagccaagaaagacaaagacagtcagtccccaaattcctctctcattctgcattacatcaattggcttcttgatataatacagagactctaaagtttagttaaccaacatgcttggattttaggggaggaaagccaaatccacctctaaatccagcattgatttacttgaatagggacgaggaaatgaagagaaatagagttattcgagagacagctgtaaagtttaccatatggcacattccttttgtttgatggttatagctaccttctcttcttaagtatctacccatgtagcattcttggacttttggagatgagttttcctgtgaaaatagaaacaaaaacttccctttcctttgggaggtttctatttagttaatgagatatagctcagtaaagacctgttagtcgtccttgttgagagggttgtcttcttcaatttgaatcttgatcaactttgatggtatccaaagttttacttctcctgtggaaacaaatgcaaaacccctaccccaacgtaacacatgtactggcttccatacagaggtcagtatatctttgaagtacactggttgattcagttcagcagttttttttgtatcccagtgtctttctgcagctgtttgtcctttgtcattggcattaagaaactttagtgttaataaagcattatgcaacctatgtttggggggttttgacttaccagcttgtctatggagcatctccttaagtgtcctgttagatctctcaacgactgcttgtcctgtaggattgtgtggtataccggtgacatgctttatgttatagcatttgaagaactgttccatttttgtggagacatatgctggagcattgtcagtttttatctgtgcaggtatacccataactgccatcacctctagcaggtgtgtaataacagaatcagtgtgtaataacagaatcagatttttcagagttgagagtagtagcccattggaaacctgagaatgtgtcaatagtatgatgcatatatttcaaatttccaagttctgtaaaatgaaagacatccatctgccagatctcattcctccgaatgcctttaggatnnnnnnnnnnnnnnnnnnnnnnnnnnnnnnnnnnnnnnnnnnnnnnnnnnnnnnnnnnnnnnnnnnnnnnnnnnnnnnnnnnnnnnnnnnnnnnnnnnnnnngatggagaagtcctttttcaaacctttgctatttacatgatgtttcttatgaaattcagaggcttctagcacacttccaattaataaacaatcaatctcatcatttccttgtgctagtgacctggcagacctgtatgggatctgatatgtataatgtatataggattacttctgtttctgattgtttcctgtaattgtaaaaacaaagaggttaattccgtattatcaggaacaaattctgcagtctctatgtgtaagacgactctctgcatattggaaatcagtaactatgttaagaggttctgtaaaatccataagcaccatgagaatggcatataattctgccttctgtacagatgtatatggacgttgaactactttacttactgttttataaccagccttacctgatttgttagcatcactgtagaaggtaagaactccagaaatgggaatttgtcttacaatatgtggaagaatccagactgtcttttttatgaatttagttctgtcagttttgggatagttgttgctaatcgttcccaaaaaatcagtaagagctatttgccaatattcattatccttccnnnnnnnnnnnnnnnnnnnnnnnnnnnnnnnnnnnnnnnnnnnnnnnnnnnnnnnnnnnnnnnnnnnnnnnnnnnnnnnnnnnnnnnnnnnnnnnnnnnnnnnnnnnnnnnnnnnnnnnnnnnnnnnnnnnnnnnnnnnnnnnnnnnnnnnnnnnnnnnnnnnnnnnnnnnnnnnnnnnntatatatgtctttaactttttattctgtttatgtagcagaaatacacactccaatatagtgtcttccctctgcatcagaatcccagaagggtatcctctggatggcaagataaccagaatgcagtctaaatcaaggtttatctgatctacatgcacatccaatattctattttctacccattgtagctctttttctgcctcggcagataatattcgtggactgtttaggtccttatcacctttaagagccatttttaaatgttttaagtcatgaccttctaccccaataatcgtctgtaattgagaaatttctcctagcagcttctgaagactattaagagtttgataacagtcccttttaatttgtaccttctgtggcctgattctttgtaaatctctatcttataacctaaacagttaattgaatctcttctttgtatcttttctagggcaatctgtaaccctcatctaggcagaacttccatcaccatatcaaacatatgtttcagagtttctttattggaatctgataaaagaacataattcatataatgataaacgagggactgtggaaattttttaccaattatttccaaaggttgttgtacaaagtgttgacataaagtaggactatttagcatcccctgaggtaaaaccttccagtgatatctccgaattggctgtgagttattaagagttggtacagtaaatgcaaatttctctctatcactttcttgtaatggtatagtgaaaaatgtctttcaggtcaatgactatgataggccatcttttaggtattaaagaaggcaatgacattccaggctgtagagagcccataggctgaattaccttatttatggctctcaggtctgtcaacattctccagttacctgacttttttttgataacaaatacaggataattccaaaggctggtagactcctctatgtgtccagcctctagctgttcctgtactaacttttctagagcctnnnnnnnnnnnnnnnnnnnnttttaatggcagggcctttggctcctctgaaggtctatcatttgtatttagtttctgtacagcctggatggttagtaaccatttcccatagcgtcttacctgatcctttctgctatcctctgcagtgattctctataattcatatctgacattggagggatgttaatttgagttttccattgctgtaagagatcatgaccccagagatttataggtatatttgacacataaggttttagtctccctttctgtccttctggtccaatgcagaccaccaagttaacactctgttgtactctagatagtgttccaatacccaaaattcgtacatttgcttccctaagtggccattcctttggccaggacttgtgggtaataatagtgacatccctgcctgtgtccactatcccgttaataattttatcattaatttgtacccgtaagtgaggtcgcttgtctttgattgagatctgccaaaatatgtgcttttcatattgtccagtcttatctgattctttatcactagccaaactaccatctatggcattgtcatctttcacaatagacaaaggactatctattcatcctgtgagagattgtcttctactgttactggaaatgactgaccctttttcgatgtgggggacttctggagtcccctttcagagtttcccaaccttaacgggttcccttacatgtccctggtggatctacactcattagtctagtgtctgcccttaccacatctcctacacaatccagaaggcagtggcctttctcgtgagggattgttagaatttctttgcttacaatttctccttaaatgtcccattctaccacagctgaaacatctattttcctgacacttccatggactcctggagagggctcttcctacctgaggcgctgattcattgtagcaatgaaccccggcctcttggtacctatgttgatccctgtaaggtgtttctccttcccaagcccttctgtcatcatctctgcgactcttaatctcctgctgccttttgaaacctcttgggatagcttctcctgcccagattccagcatcttgcccattatagtcaatgtgggcagtatgcaaaactcattcttctagtggagctgatctgatctttaaaggcaaaagtattcttttgcatattaggtttgcattgtcataagctaatgtatacacaatcgaatgtcttattgctggttctatttcttgtaagtctactgctctggtcaaccggtccaagaagtcctgaaatagttctgttggcccctgttctattttggtataagcttccagtcattcccctggctcacaaaccttatcccatgcatttagtgctgcttttctgcatagggatagcatatgatcgtcatattcagcctgaacctgtgggtcagcataaataccttctcccaggattttttctagaggcacatcaagactgtccctaatggcttggtgttcaagaagctttccttcttccctgattaatgccttccttccatttgacaagaattctcaaggacagttgacactagtccgtttgagctccacgttgggcgccagttataacaagagagagaagtcgatccatagtccgtaaagttatctttttatttagataaacaccagccaaacacaagccagagcagtgaggccagggagaaggggcaggagaagaagaagagggggctcccatgttccctcccacatcatcctgacctcaccttggccacaccttggcaggcgtggtcaggcacacctgtagccagcccttaggaggtgtggttacggtgtctccctgcagggcccagccttgccgttaatagactggtaggttttctatctcctctctgatttctagtccatcaagacatagacctatgttctggaaagccttctccaccatgatggattataaacctgaaacaatgagccaaacaaccccccttaagctgtgtttgctctgttactctgttgtgtgagcagaaaaacaaccgccatgcagagcctccctgatgttactcttaggttggttggttgtttctctttttcatccacaactgaatcaatttgtagccaatgagtgcttgacctagaaacaaaactaaagatgctgtcatctctccaatggctcctgtgaagagaggaaacaggactgggtaaatgctctaagccttaactgcttatttaaggaatggggtgcattgtggtcactgtgctcactcagcaaatatttactgagcatctgggatgtgccaagcaccctaagggacatttatacaagagtgaagatgaaattatatgtgcttaaaaggagcttgacctaactaacccctaggaacaacagtcatttttggaagccatgcacaaacgagcattgaagttacaaggaaagttatcactgtgcatggtgtggccaatgcttctgccatgaagactgagttccacaatcagaactaaggtataaactgaatgtttttaactacctcattgctgtatgtataaagattcctgggctggagagatggctcagaggttaagagcactggctgctcttccagaggtcctgagttcaattcccaggaaccacatggtggctcacaaccatccttaatgatatctggtgccctcttctggtgtgcagacatacatgcagacacaacttgtatacataataaataaattaactttttaaaaaagattcctaccctccaaagcacacatatgaacaaacttacggtttattgcactgtgtgttgctatgacaaaatgaacgacctgggtgttttataacaaagagagacctggttttgaagccagaggttcacgatctgaggctccatctatgtggctacaggagaggggaagtttgctgcatcctagcatgggagagaaccagaaagaaatcgatcgctgatacagaagaggctaagcatattctgatagggactaaagtgactaactcactccaggaggaaagcattaattcagtgacccaaccacctcccactaggctccacctcccactaggccccacctcccgataggctccacctcctgctaggtgccacctctcagcatcactgcactggagagcaagctgctggtacctgggtctctagaggacaaaccacatccaaactatagcacttgtatgtaaagatatctattaactacacagagcatcaggcacaggaaagcagtcttgatggggttgtattataattcagagacatcagatattttcacactaaaaaagtgttaaaatactgaagaaatacaaaaagcttacttaacaaggtttagcatttctgtgaataatattttacttacaaaaacatatatgttaattatttgtttccactatttatgcccaagtcaaatgaatgcttactgttttatccctgaaggtgtaaatttttacaattgatattattttggttaggcatccttaataagtatgtattatgacttctaaaattatggaacatttaaagctatagaaacaatcatactggcacctggggggggaatggaagaatcatgagttcaaagccaaacgctacatggtttgaaaacagttcaactatatcagaccctgtctcaaataagatgagagagagagagagagagagagagagagagagagagagagagagaaaggaatgtttaagttttccactctgtattttggttttattcacattttacacagtggccactgaaagcacactgttccttggcctgctcgttaaggacagtagctgttactctggacaataagaatgtatttacacagaccatgcttagcaggaaatggcagttgttgtcacatactgtcggttacaggttgctcatgacactctttgatgcgtttatctagtttttttttttaacaataaaaactcggagcaagaacttgaatgatcagagaagcagcagagaagccaccagtgacgtcctcttccttttaactccatccaaaaaaggccaccctctctaagccccaccctactacttcctgtctctctatttgtcctcagtcctccaaaatctctaagactaacattggtcagctagttgctagctacaccctccgattcaaagcaaattttattgacagtcttggaagcattagaatgctatcaaaatatcacatgaatttctttcttttttcaagtgtgtgtgtgtgtgtgtgtgtgtgtgtgtgtgtgtgtgtgcacgcccacagaggccagaaaatggggtcagatcccatgagctgccgtgtagatgctgggagctaaacccaggtcctctgtgggagcagccactgctctaaccactgagccatctcttcagcccctcacatgtgttcagagatagagatttaattctctcagtgttaagattaagtaatgctcttaacatggccaccaagagcaactctgttgctcatcacctgtgagtgtttcatattttcagaattgttttatattcgcagaactacactccagtagctaccatgaagaaagaggggaaaccctgactgtcatctgaaaatagggtagataacagaagatgattatgtgattggatctagaatttatttctacagtgacagttctcaaaacataaaattacactgcctcatttattagccatcccctggtgttaactgaaaagggggggggggcatctagtagactgcagctgcaaacttagaatactcacgcttgggattttcatcttttctttgagctaacaagggactttttttctttgaggttttttcaagacagggtttctctgtttagccctggctgtcctggaactcactctgtataccaggctggcctctaattcacagagatccaccagcctctgcttccagagtgctgagattaaaggcgtgggccaccaccacccagctacaacaaacgttatcaagttagactttttttttttttttttttttttttagcaaacatcattgttctctatctggtacaattccaaaggctacattgttagatttgatgtgatctacaggaagcttctagataaatctgtgacaatgtttttttaatttggcagatattctacaatgtcagcatcagcttacaacggaaggttttctaagtcttacttcctgtaccacttgactactccatatgaactggaaatgccttcttcaacagctcccttcacagttcaggcttcagacgcagtatgggaataggggctgtttctggaagtaatgaaagagctgatggtgaacttcatataactcaattctgtttaagaagtggctcactcaatagaaagcccataccatggcaactatagatatggtgtttatttctatacatgatttccaactaatattttaggttgtttcatacataaagaaagtaaaacctatgatcatgtagctgttttctctcagtgtttaccaagacacaaatgagttgaaaaaaatgggaacctctctctgggtgattcatgagatactgaaatagccacactcttctgtttaagctttgttatctctttttatttatattactgttttgttgtttttgttttggacccagttttcctattgattttgcaaatggaacactcccaaactggataacatctccacacctagattaatatcatttttttccatttttgacaaatagaaaaaaacgacaaggaaccatataaatgaggtgactcattcataaatcctaacctccaccctctcctctcactgttgcatcaaatgtagacctattgctgagcacagtaatcttcctgtgccagagattttgtttggggcaggaccagttaccaaagctcatcagtgtcttaaagtgataaatggaggcatctattacagctcactgtgaaatgttacattttgtcattagttaatctcttgctctgcctagtttataacttaaacttttccatgggtgtgtatacataagaaaacacaacacagttaccattgggtttacaaaaacatatatgttaattatttgtttccactatttatgcccaagtcaaatgaatgcttactgttttatccctggccacatagatcctgtctgtaataactctgcctaatttctgataacatacaaaaaatcatattggaatagaaaatagcgactcgccacagaaacacagaccgtcatccttactgagtatgtgttcccatcactccaatgaatcttgttagcgttcctattcatgtatatttacagagataacatactcatcaaagaaaattgaactcaggacctctgaaagagcagccagtgctcttaacctctgagccatctctccagccccaacttttctcgagttcaattcccagcaaccatatggtagctcacaaccatctgttatgagatctggtggcctcttctggaccgcagaacactgtgtatgtagtaaataaatctttaaagaaagttattaccataatctcaaggcttatgagagaggaataagattgtgataccgtagatgtacagacatgctgctgttcatgtgttgcttgcagtacatgtgggagcaggtgcaagccatgacacacgtgtggaggtcagcagaccttcgatcatgtcctagtttgctgtttgtggttgtgaaaaacaccacaaccaaaggttttttgtttttgtttttgtttttgtttgtttgtttggcctacacttccagagcatagtcaatcctgcagagaagtcaaagaactcacccgggaaccgaagcagaaaccacggaggaagacagaccacagcctcactccctctttcacttgcgcatgctcagctagctccctctaacggaccagcctgcctgcctaggaacagtgccacccacagtgggctgggccctcctacactaatgagcaatcaaaacaagttcttacaaacatgcccacagcaatctgattgatgttccttttccccaagtgactggtgtgtattgagttcataataataactaactggtacacacagtgtaggattcaggggctgaactcaggtcactaggcttgataacaatcaccttcacacactcagccatgtcgccagcctggaaatgccatccctggctgtaacattcatcctcacaccaacactgcagtttgcacatggtttgtcccccgtggacttggtttgtagttacataccccgtacagcagtgctcccatgtgaggtttgggttgtggagaccacaccctcctgaagaggtttgtgtagttcccacaggcgtggattggttatctcaaagagtaggaatggacacctgatctctttcattccctaattttcagtgtgccttctcatgctcttatttatcatggtgtctgaagccgcagaggttctctccagcagccacccaaccttagctttgtgcctctagaaccttgaatttaacagccctcattttctttaagggttacccactctcaggtgttctaattgaaatagaaatggactaagatgaccagttagaaagaaaacgatctactaattaatgcaacatgaactctcttttttgaaaagtatgtatgtatgtatgtatgtatgtatgtatgtatgtatgtatgtatgtatatgtgggtttgttcatgtgtctgcaaagtccagaagagggtaccagatccccttatgtcacagtctgctcctagataacctttcatcttagtgggaaacttgttaggacacaggatgcgcttaaggaaagtgaaacattgtatcctgcagggaagttcatttagcttagaaagcaaacaactcagaagtttcaggaagttcctaaaacagaccagattcactaggcccctccctccccatgtgtgtgagcagtaagaactcctgagagatattcttagaccagtccaccttcctggaagaggcatgtgccaactgagctgcatggaaaaaaaactctccagctattgagctgtctttgggctgtgcagtacactccatgttcccagcttgtgtgagctgttacccacaatgggataggctttgctgatgcagctatctttgagtcatttcttctcctgtaactccttactcttacttctatatggaaccccagtgaactcattggttcaccaagttggacttagtgatgtccttaccttgaactataactggtttcccatttgtagatatttgtttacgtttcctcaggaacagtgtcatatgaaacccctggaactggagtctcaggtgatttcgaactgtatgatgtggatgccgggaactgaatttgggtcctctgcgagcagtatgcacttggacctgctaagccgtctctccatcccctgcaacacggattgtaagactcagtttgagagatttctgcatggactgtgcaggattgtggaccttggcacggggcacagtaaggactgaacaggaggagagggaagcagctggagtttctgcctgcctccagtggttactgaagctgatctgggaagagctggagaccttgcctccagttggggtttttagcgtttgtagaggagataacctctccagcaatcccatgcttgagagacagcgggaaggaaatgggtgacctagtgcctgggtcatcttctcctttgttgcctagacaggaacagagtgctggtgacaagggtgagactgtgaaagtcatgcacagagaccaaggtggttcccagtgctcccagtgggcacatcttctccactcacaataaagggtacaatgacctcatcacccactaggccaggggccaaacagagaacagacccccacagaactgagaatcccatcctctcaaagccaccaggtcgcaagaccacatcctgtcaggtacaacctaaaagatcaaacctcttaccccaaaagactcggtgcttaaaaatctggtaatacaccaaacctctacctgggaagaactcaactcagctgctgccagtgagtcagaagacagaacctcgtgaaaaccagagttgtttcagacagtccaggggcctacatctcctctgcacttctgtcttagtgcagtgcggttaggattgtcagctgggctcctggtagacagagccatcgggcacacctgtaaggaattggccagttttaggttgaaatgcatgaggaggacggtcctggttgtgttatttcatgtggggaagacttgtttttattgtgagtggcacctttccctgagcagggaccctgggacatatgagggtagaagccctcggagctcactggtgtgcctgagctcattgctttttctgactgtgcatgtgatgtgatcagctcccttcagcacctgtggctataatttccccaatgtcatggactttttattcacattttacacagtggccactgaaagcacactgttccttggcctgctcgttaaggacagtagctgttactctggacaaaatattttatcacaacaacaggaagagaaactgagacaataaaggtatgggtgacctaagaggggacatggcatcttctctgctggctcagcaggtgctgctattaccttaatctccagcagactccctgattctctccaggaagcaatcacttccttttgtgaattttctcagtaggtgagctctcaaagttgtttcttttatttggttggtttgtttttattttgtttttttaagacagggtttctctgtgtagccctggatgtcctggaactcactctgtagaccaggctgccctcaaactcagacatccatctgcctctgcctccccagtgctgggattaaaggcgtgtgccacagctgcccagcttcaaaatggtttctaattggctgttgtggcccacacctgtaatcccagcactggagaggcaaatcaagaagactgccaccaggccagttagatattaaatgggtaaaggtatataccatcatgcctgatgacccaagttctgggatccacatggtggaatgggacaaccaaacccacaaattgtcctctgatctcacaccccacacacatgcaaataaataaaagtaacttgttaaaaaagattaagattgctacaggttcaaggccaccctgtcttacatagtgagtttgcaaatagccagggttgcagagcaagactctgtctcaaagagcaaaagcaaagtgttctgggtatcaacaccaggaggtcagaggtgtgaactgttggcctcagcccaaactgtagtagaaactgaacagtggggcccagaaacctgtttttgacaaattgttcaagtacttggatgcatgctgaagtttgagagcccctgatgtcccacttgtgcctcttgtaggagacctgccatgtgcattgtcatcttgtccatatatacatacaaactatatgtatgtatgtatacacacacacacacacacacacacacacttaagacagggtctcattctgtagccctggctgtcctggaactcactctgtagatcaggctggcctccaactcatagttccacctgcctctgcctcctgagtactgggctcaaaggtatactctaccatgcccaggggtctgtttcatttcaacattatggcttgagttctgctgttatacagctggactattccatgtcacagatgtgtccctgctgtacaccctggcagatccctgagacatccctctccattccctgtggcttggcctcctggctcactacaatgcttccagcacttcctgacaaggcataatactttcaattcccatatgcaagggatagtcctcatggcccagccccttactcaacctcagctcccctccctacctcagcctctcaccctcagcacagccctcatgtcagcttcccacagcttccttggtgtagggtaaaagggcagccaaaggaaccccactctggacctgacaccagagccaactctgcctctgaccaactgaaacaccctgagcaggaaaccaaccaatccctgatcaccttgactctgaacccagaacccagagccagtgaaagaaacacacccaggatctgaaccctgaaccagtgaggaacactttatccttgggcccagaaccaaagaaaggcaccctggctttgaaaccagtgccaaagaaacacactttgttcctagaatcagagccagtgaaagacataagccctggccctaaaactacagccaaacggctaaaaagggccagtgaaagaaacacagtttgccctgaaatcagagccagaactgaccctgacccactaaactaaccaatccctgagcagaaaaacctctccctgggaaaactctacccctaagaagccctatataagcccgtctgcctgttcagttgctggctctcctttctaccttggcagaggcagccactctccaggactcctccttcccaaataaatctcttgttcaaaatttgagtcttgggtggtgattttcatttgttggtacagaatagaagaaacttgctgggatattcccttagggggctgagcaaatatgtagcagaaaagtaacaacttttaccggagccataggagaatgatacatttcttgggggggggggttctcctttagcagctgaagaaggagttcttaactctgctaggacatttgtcttcgcttagagctcatctgtagtggctctctctaggagagaagcaggattgctaatatcctgtgagcagacccagcttcgggtagtcaggacacacctttccctctagggctaagctgtcctgttgcagcgctagccccagagctgtcctattgtggctctaggtagcctggcttccagacaagtcaggacaccttttcagccccagagctgtaaccctcacacttgttacattttggtcctcacattcacttatacttggtgcctgcctcctacaccatctctttctacttgtgcattctgattctgcttcccactgactgaccacgagttacaaggtgtccgcctttcccaagtcccggcttctctagtgagactggagccagtcaccacagtcacatcctttgctctgtctccattattcttatggaaaactcaaaccctggtgaaagccaattctcctctgccatagctgcatccctgactggtcttacaggaggaaatggggaagccacactgaccagtcaccctctcagctcagagctacagaattcagagtatggcactaatccatcacctcacactgtcttcctctcctccccaaaggcaaaggcatcctttccaggccttattctcattctggccataaccttgctcatgaggaaaatagaagcaatcagagcaattcttcgaatgtctgcctgtgtgagatgggctgacctggttatgctgtgcctggcttgcattctgttaggaacacatctccccagggagtctcctggaaagatctacatgtacacatttgcagtccctacttttctcctattctttcttgaaacttttgctttgcctctgcccacattgttgaaccaaaacggctctttgtgaggtcccctgtgaccttcaggggctcatgctccccaatcccattttcatgttaccccacccaccagcagtgtttgttggcatagtgggtggcttccttcttgttgccttttacatccctagcgtctaaacagtaaagtgtctgaggatgcagccttgagtgtcaaccctcactcacaagttttcagcttgagccccagagtctgtgtcacactgcctggacatccacacaggtacaacagacaccttctggcctgtggccggcagcacatacacaagatggtcccagctgtgtaggagggatcccagaagaagcagaaatgaggcaggagtactggtgaggtcacatagagctcactgtccctcaggaaacccattcacaggtccccgtggatccggaagccatagacagcgatgaatgccatagatacaatagtgttttccctcagtataaatgcttgcagtgaaatgtagagcaatgacactgtactgtcatcaaagtgacgtgaccatgtccatctatgtatcccattcacccttctccatatgatgataatacagggcctacatgaggaggcagagtgaagtgtaggaggcaggcactatgatatggtgttaggttactatgtaactcttagcagaacacagtccttgtgataacttagatggctactaagtgactaaagggaaggtagggtctattgcatagatacattggacaaagggatcatttatgcctgggcaggaaggagcaggacaaggtgggagaattcatcatgctgtttgttattggattataattaaacatttaggcattgtttatttctagaatttttctacttaatatttgtggggctgcagttacgggttggaaactaaaactgtgggaagtggtactctagataagagtgggcaggagaccacagatacgtctacaatataactcaggcacgtgaggctccagatcactgtgaaagaagggtgtagggattgtaagagccagagggacagggaggtcgaggggactgtttcctaagaatgtcagaagctacacccataacgtcttgccaacatagctgcctaaacatgagtcgaacaagacaacaatagacgtgctaacatggatagggagagcccggcaggcctcaaaccctacacccagaactatgggtaactaaggaatgttctgagtgggagaaatagtgttcccagtgaaaagctcaccaactgattattcatcatcaaatggtcaatggaaatatgtacatacaagtagcattatacagactgagcaggttgtagttgtgtatttgtgttaagttgtgttagctgggtggtggtggcacgcctttaatcctagcacttgggaggcagaggcaggtggatctctgtgagttccagaccagcctggtctacaagagctatttccaggacagcctccaaagccacagagaaacccagcctggaaaaaccaatatatatgttgttacattatacatatatgtatacacatatgtagacatacataaatatgtatgtgtatgtgacaacagttcttgaaaaagaggccatgaacttgacagcagggagggcttggaaagatgaggtggaaaggggaaatgatgtgattatattataatctcaaaaaataaaattaataatttaaaaataaatatatggaagacagaatgggcctgtgagagagatagagagagagcaatgaactgtgttgaggacatgctaggtgtgagttatgaactggctgtccaacagaaaattagccttaaaagccatggatttgaagatggaattagaatacacaggggtacaataaagagatccaagtagggccatggagatgggctcagtagcagaggcctgagaaacactgatatctatagagacccagggaacgagggcagtatagaggagaggaagggagtgactaaggaggaatccccggaagtggaaggaaagagatgtcatgaagtgcatgtctcttccctgaaactgacctctcttcattctcaccaacccacagcttcctcccacgcccaggagaggccaggcctgccgttaaagccaaggggtgagcccacctcatccaccagtaagagcaacacatatttgaagccaatgaggcaaaggtggctttggcttgctgctgcttctctctgatctctcagcattttcctctatatctgactccgggtttttattatttagaccaattaagaattccatttacaacctctagtctaaaccatacctgagttcagaagtgacatcatgatctcatgatacagctcacagagtacttccaaggacatcccccaaacagacttcagaataagacatcaggatacatcttcccaagatgacaaccttaaataaatgcgtttggctatttaaaaaaaaaaaatagtgtgtgaggaactactgttgtgtaggtaagaaacagagttgttgcaaactctgaaggtgggggtgagataatatggacacagacatgatccttggctgggagcagggagagagagagagagagagagagagagagagagagagagaggagtctcacctcagttttgaaaagtgacttgaaatgaggtgtttggaagttgctaatgtgtttcactagagtggttttgctgagatcaaggagagcgctaaagtacccagaaaacaaacgatggttctggcgtccaacgagagggttactcttctcattgtcgaccagagagttgaaaagcaccagcttacagcgaatgtatctgggctcacggtttgaggagctagagtccactatgtggagaagcgggtggcagtgagtcccgccagacagacagcaagctgagagagcccgatgctgccacgagtcttgatttctcccttgtgttcagttctcatctccagacctcctcagtgagaccaccctggaaacaccaacagacgagtctcctattctgggtgatttgaagcctcgtcacgttgacaatagcggctgaccgttacagtaggctacctccttcacggaaggagaagataaacactgggtacagacagcacaggcatgtccgtggggctctacagggagatgagggaacacaggctgctgccctttttaatctccataaaccaagatgagggagagacagagagtcagaggcacagacagaagacagcgattatgtaggggactaagacaggaagataaaagttcaagaaccacatgggctacaaggtgcattttgggccacctgggcagcttagtgagatcctgcttctaaattgaaatacagaaaggggcggagctacaggccggtggtagtggactgaggccctgcatttaatccccagggccacagaaaggaggaagaagcaagagaagggctaaatagaggaaatatgcaaagtaactgcggagactgagagagccaaacacagcagaaaacccttttgtgagcagacaccagtggatcaagcgctttcttcagaaagcagcatgtgctgagggagaggaggggtactaattaactggtccgagcatcaaatactaggctcatgttcactcagaataaatggatctgcatagtgtaggtgtgttacagaaaccccacactgtaagtataaactaaacgtaaagttttatcttgaaatgacaagatgaaatttattaccctgaaataaataggtacctattgcctttggtggaaacaataaggaaaaaattaatcnnnnnnnnnnnnnncaggaattctgctaattgtcacttcagtgacaccatttcctttctttgaaatccgtctggacgtgatcacggggcaaggaggcctttgcagacccaaagtacacaagccagttaggagacaaacagaggaaatgaaccctccataaatctgtcagccagggggagcccgttcctgcccttacaaaggccttatctgccccccggggtgctgttcctcccagcttcctcaagccagtggccagaaccactgagtgtgaggagagaggtgggcacagcttccaactgttgtgacttcacataaaccctcagaactccttgtaccaaagtctctggtggcagcgaattcagtagctcccgagggcaccacacagtggatagctcttccttcctcagacttagcctttatgctgtcccttaatgagggaagagagttccataccgaatttcctccttctgaagtccttcctaagggtttgattgcatacatgtctgattacattggagagtgtcactccagagacataacacagttatttggggacacccagataatcaccatttggactactgtattttggtaacagtatgcctactgttgacatacaatcggtgtatttagtaggtgccgtcaaagcaatctttcattcaccttgttaacgtaccagtgacaccctcacccttggcaatagcctcctgctgccagctccctgtaacaggctgaacaatggttccccgaagatgtgcgtgtcctaagccctagagaggtgttacactgttagaaagggctttgtagacacagtcaagggtcttgagaagggaacactggattagctgagggagttcacagtaatcgtgagagttctcagaaggaggcatccaatctgacggcaaaagcagagctcaggaaccagggcaaggactgggagaagcttctagaagctgagaaagacaaaacaaatgtattttcccaaaaggaccgtagccctggcatttcgtctagcctttagacatccagaagtgggaaagaagaaatgtgtgtgttatgggatattggtttgcactgacaatccaagatggacaatacagttaaaacttgaatcaaggggcggagtccacaactggatgaccagaattagccatagagattttggaggtccagatagagaggtacaggaagagataacatagggagaggcttaggaagacttttttttttttttttccaatctaggaagaaaaggaaaagtcagcccatggtttctctgcttctctcttgatctataaggtttgcaccccaatatctgactccagagttcttactgataaaagaatcattcatattaacacatattgcatgtccttttgaatcactacagtcccaataatttgttagaacaaaaatagggaacaagttactctatttagtttaataaacatcctgttcatgtatatcatagctgaacccaatgatacagtctgccctttgcctctgcaagttctaccaaccacatgtgaaatattaagaaaagaagaaaaagaaaggaaggaagagaaagagagagagagagagagagagagagagagagagagagagagagagaagaaaacatgtgtaaaatcaggcatggttacaatcccagtgaaggatgaattatgtgtctgtgaatgtaaagccagactggaataaatagaagaccttattttaaaaagctgggtggtggtggttcacatctttaatcccagaacttgggaagcagatgcaggtggatctctgtgagttcgagaccagcctggtctacagagtgagttccaggacaggctccaaagccacacagagaaaccttgtcttgaaacacacacacacacacacacacacacacacacacacaccaaaacccagagtgattgttaacgctgagattcagcaatggctgtgttctatctttttaaattacattaaaagtaaacttattctcactgtcttctcctaaagatgctcttagaatactagtacacagatacatgatgaagacagcagccaccaccaagatggtgtctagatactttcttaatcagcttttcatttctgccttgtaatatttttcttggagcaaatgttttaaatgttggtgatttggagctttatgttttttgagacaggattttttgctttataacccaatctgggctcaaacaataatcctcttgtctcagtctccaaaagtactgggaattcaggcatgcattaccaatgctttatgtcagcaacattaccattaccacgcactgaaggtctttaaaatattatccatttattgtgtgttgggagacaggtcctggcaaatgtgcagaagcctgggaacaacttttaagagtctgttctttccttccatatgtgggatcctggagatcaaacttaagtcattagacttagagttgagcactttaccccaagtcatcttcccaggctaagcattgagttttggtaaagctaattgtcaaagcttctcttccatgacatgtccgtgcactgtcttacttccttccagtaaccaagcttcaaccaaaggcttctttctggcaacactgatggcttgtccagatccaggcagctgtgaactaggctgggcactactacagttaaagaaaaaaatgttaaaaaaatataaatacatattcatttgtaatcttaacagttttctcaatttgtccccttagtggcattttgacacccagaaagacatggagcatcaaaaacaaccaatgatttgaccaagattccattggtaaacaacgaattaaccatattttcttctaaatctttgtttgtttgtttgtttgtttgttttctgagacagggtttctctgtggctttggagcctatcctggaactctttcttgtagaccaggctggtctcgaactcacagagatccgcctgcctctgcctcccaagtgctgggacctgaaggcgtgcgccaccaacgcgaggctttcttctaaatcttatcaatggaaacatcacttaggttgagttagaaaccacttttttaaagatgaaaaaaaaactgtcagtctctctccgttggtagattataaagtcagtttactgaggctggaccaccatctctaagaaaatgaagaacagacttttaatgcccgctgcacatagcaaaggaaagggctcttctgtgacattctgtgtacacgtatgtgcatagggttacagtccaggatgcttctgtggagtgtgttgcagagcgattccgtcatgagggaatgtcaccaggtatgctcagcaactaagacgtctgtggtgtcaccaagtgatgtgatatcatcctgcacacagtctctagttgaccaagacctctactcacacatgagtgtggatgtgttaccagctgcaagagaagtctgtttctcttcctggttgttgggagagacgttgggccccagcccccacgaggtctccttgagttgcttgtcagccaatcatcacaggtgcatcctgttttctagtcctggcttacagccccagccgtaccctgctggcatcaaaaacatgagctcttatacctggggtgtataaggccgctccctccctgcaaaaaagacacacatagcacaagctgccagacggctctgcctttcattaaatctccaggctttcgcctgatgctccgacttagtcgtgttgcaggcaccacaagtggacactccgttagaccaagtcgtggcgcaggagccacacctggtgatggcgaactcacacgcgctgttagtgggagtctccataaaacacactcaaggaagcgggacgcccacatactcctgccaccctaacaaacagtgggtgtataaccagagaagacacaaacagaacgtcagagaaatccgtgcttccagggctattgctccctgaacgccacggcggagacgtggaatcaacacaaagactgtcaatggagaagatgcggtccgtgtatgtgcaccacggagtgacaccaagctatgaagaaaatgagactctgtcattcggagcgacaaaggtggaactccgggcagtaaacatcaagtgagctaagtcagggcggaaaaccgagcgcacgtatgaggatgctaaaggctgatgtggttgaaacacagagtaggacagcagttatcgtaggctggaagggtgtgaagaaggaagagaggatgggcggacggtgggtatagatgcagttagagaggaggcaacacataggaaggtagagaacacattttccatgtatgtatctatggtttcatctgttttcgtgtgtgggtgcatatgtgtgtgtattttggggtgggtaagtcagagtcaacctcttgtgtcatttagttgtcatctacattttggggggacaacatctctcatgagtctggaacttcctgatgaagctaggccagctggccagcaaacccagggacctacctgtctctgcctccttggcactggaattacaacctgcaccaccaatgcctgatgtctttatgtgggttctaggtcctcatgcttgtaaagcaacactcatgactcatctccccatatggcctctttttctttaattaataatttattttgtaggttttcaagacagggtttctctgtgtagccctggttggcctggaacttgctctgtagaccaggctggcctcaaactcacggagattcacttgcctctctctctcttgaatgctgggactaaaggcgtgcgccaccacggacatgctatttatgtttttgagtcaaggtctcatatagcccagactagcctggaattcaccatgtactatgacctcttaaacctaaacctcaactgcctcagtgctgagattacaaactactctaggctacaataaatgttattaataaaaagcctaaaattactaatttataaaaaaatgtcccattagggcaattgtgccctatgtctgtgacaaataacggtactcccaataacagaatctggaagagaaactaaagatgtggtgggaaggctcagcccaggccctagcacacagcttgactgtgagttgaagcactcaccgagccttggcagctggggctgccaggtccctcactcattatttggtagcttgatacattatatggtgatctgatacattatttggtgatctgatatatggtgatctattacattatatggtgatctattacattatatggtcatctgatacattatatggtgtatctggcacctttttgtttttttaaccactaagccacatgaaaattgtgttattttccttcctctgtgcttagtctgccttgttgtggctcctggcttccactcagcctcacacttgttctttgtgggaactgttgtcagattaaggtttaaagtgtgctcagtaagcatgactcgattaattacactaattataccaagcaatacttggttataagtcaagtcgtgagccctaagtggtgccattagaatgccacatctttgacgtggaaacagcttgtctgaatattttatttctcctgactgaggtctgtgtttctagacagtcaccttttgttccatctctgctgcctcctggtgatctggagctccacacttagtctccatggactggctattctgtttttgagccctgtgctgagccctgtgtggataacaagcttttaccacccagaatgaatcccttgaccacaggccaaaaagaaacaggaaggagggggggggctctgccccacctgccaccagcccctcagtgcagcctttggactgtcccatcaggcttaccgggctctggttatcccatctccttgacttgcccttcggcctatgggtgggatgagctgcccactgctggtggttttctggcccttccccgtctaggacaggtgtgtttaaagctgcctacactgcaaacctccctctataagaggaagattaccatacacgggataggggtgtcgtaggttaattttacttgggagaaatcacttagagaaaccgataacccatgcttagcgcgctccaagcatccagtctcagctgctctccgagacccgacaggaaccccgaaagagacccttgcttcctctcctcaggcctatatcccacctttatcgcacctgtggccactcccaaatgggcgtggtcagtgccacaggtgcctagtaagacctctcccgcactttagcacatctcatggggctgtagtgagaattaaataaatgaaagggtcagcggaactcagatcaacagagggtgcaaactgagcaagatgggtgttctcatcgttacagctgctccaccggcatctcctgcttcacctgaaagataggcctgaggatggccggaatagtgatggccggacttctggaaagtcttagtgcccggaggcctcgtggccctccttccatgaagacacccacagacttggaaggaagctgtggatggccaccttcggtgggccaggcatggaatgaaagagatttggaattcagaaacccaacttccaattagctcaatttcttccaggttctaacttccaaattagaagaacttccaattctagcttcagatgatcctttagccaacaggccagtgtgcacgggagcataaagcacccaaatgcacttctgtacttcacagctggtcccaagccagcctgttgacgtccaggttctgaaggccaggtgtgagcctgaatgctgcgatgaacagatcttatcaaaaagagagccagctggtctggtgcatgctcacatttattatcctggtnnnnnnnnnnnnnnnnnnnnnnnnnnnnnnnnnnnnnnnnnnnnnnnnnnggaatggagccccctctgtctcaggggcataaaggacatagcagggacctaggggtgtgtgctgagagtggggccaccagggctctaggaacctaacaggactcagggctgctatggctcaacagtctgaactttgcatttactgtctgcaaagattatgtcagtgactgtcagagctgggtctagagcagcaggtctcaaccctcctaacaccacgaccctttaatgcagctcgtgttgtgatgacccccaaccatgaaattatttttgttgctacttcataactctcattttgcctttatgaatagtaatgtaaatatctgatacatagaatatctggtatgcaacccctgtgaaagggttgtcctaacccaggggctgagacccaccagtctagtgtcacaggctgttaacctagttcttcaggaagctgagtaaggatttaaggttcaaaattgcctgggagttcaagcctcgagaggagagcatactgagacccggtcttaagatgaaattttaaatgagctgggcatatagctcaatagtagagtgtttacccaccatgcaccagatctcactccccattcccagagctgcaaatatgacatttaattttaaaacatagtctgtccttagagttctcgtgagtgccaaataagggaaatctggagatttccatagcgtctgacttgtcccagggactcaagcttcttgtgctctttagcaacacccccattaccaagacccatcacagtacctaacgctcagctggtgagagtactacagatcaaagtcaatcaaagagaaacaggggtgtgaggaagctacaaataggtacttacagtgggtttcaaccaactcaatctcttcttttctcacaaaacccaaacccagaaaaaatgcaatgattacctaaagctcacacagagtgggtggggtgggtctgtgctcctgagcacggcaaaagagtttcaagatctaacttggagccaggcaccgtggctcatgcctgcaatcccagcttgggaagtagaggcaagaggaccagaaggctcaaggttatcctcacctacgtagtgagtttcaggccagcctgggttatgccagaccctgtctcaatcagtcaatcaataatcaaattctgaggtgagagggacagggattcaaactccagcatttcgagtccagagccctttgagcatggggcagccttattttacatagctcctttgttctcacctgtgaaggaaaagcgtggataatcatacacagttgtgaatggtaagtgagaccacacctgtcagttctccttattggtctacttccaacagaggcgggagggtttcttctggagagatggctcggtggttaaacacaccggttgttccttcggaggacctgggtttaatccccacccacttggtggctcacaaccctctttaactggagttccaggagatttgataccctcttcaggcatctgtgggctctggacaaacatatgacatatacacacgtatatacaaaataaaacttcacacagtcttagttaggtttctattgctggaagagacactatgtaactcttaaaaaggaaatcatttaatttcagtttcagaggtttagtccagtatcatctggtgagaagcaaggcgggaggcaggcagatgtggtgctgagctgagtcctcacatcttgattcacggcaacaggaagtggtctctctcactgggcatggcttgagtatatatgaaacctcaaagcccacctccacagtgacacacttcctccaacaaggccacacttcctaacagtgtcactccctttgagagccattttctttcaaaccaccacacaaacacataaaataaaaaaatcttactatttttttgcatttatttatttatttatttgttggggcataggtgggtgtaagtgtcatgcctcacttgtgaaggtcaaagggcaaaccatggcagtccattccctctgtccatctcctgaactcatgaatcaaactgacccaagagttctattctaacaggggctggagagatggctcagtggttaagagcattgactgctctcccagaggtcctgagttcaattcccagaaaccacatgttggctcacaaccatctgtaatgaaatctggtgccctcttctggtgtgcaagcatatatggaaaacactgtatatataataaataaatacaatcttaaaaaaaaaaaaagagttctaacagtaactgaaatagaactttcctcggaacaccggtggtctcatagtgatagtgcatcaggagagccacccttttaggagtggaaggtggtgctcttgtcatgtacatacatgactaaaggctctctgtcacgcaggacctgtttctacgcaaagctccttccccaaaagctaattgtggcctaaggaggctttgggcatgaacactgtttcatcagtaccctgggaattgtgaacccagggcgtatctatgatgattttatttagggtggatctgtaggtgagtgacagccatggtggaaccacacccacccaatgaccttctaggtctacatcaactttggctgtcatcttgccacagagggacaaacctggtgacaggaaagatgcagggtgggtagacacatggatgtcgtgcccggccactgcttctagttcatccccagcaaggtctgctgtgcccataggagctcagaaggtggaggcaggaggataatcacaaactcaaggcttgtcagggctacagagtgagtttaggatagcctaagcaactgagtgtggtgactgtttcaaaatgaaaagtaaaaccgggattggggcatagctccatgctagatggtagagtacttgcctaccacgtgtgtagccatgggttcaatccccagtgtggaagaaaagggagaaagagaggggaggagaaaggggagaattcatttccaaaaaaatttatggagaaggtagggagctagatcctcagcactagagacagggagggagggaagaaaggagggaaggagggattaacttcaccctaaaaaataaatgtactcacctaagaaatgaaaagtccctgcttagaataaaagcagtaagcccagggttctatattcagtcagagcagaacgttgagtctctcccctgtgtgacctgactataccctaatttctatttgttgacatttatgcataaaaatgtcaccgtgaaacccaggtctttgtattgtaaccaaaagaattaattgtaatgataataatagtttcctgtgttatggggctgtttttctttaatttactgattcttatatgtggtgttttgcctgcatgtatgcctgtgtaccgcgtgtgcctggtgcccacagaggccagaagagggcattggtcccctgaaactggaggaacagacagttgtcagctgccatgtgggtgctgggaattgaacccgggttctttggaaaggcaactgctttaatcccagcagccagaaactaggtggtggtacacacctttagtcccaggactctggattaagaggtagatggatttctgtgagtctaaagccatccagatctacacaagagtgaattagtctaaaagagaattagagctcacacctttaatcccaacattagggaagtatataaaacagaagcaaggtctcagagaagcattcactctctagccatgctgaggcgaaggttacagactgaggcttggtgaagaactcgtgtgtggatcaaccccttcagcacgagttaaaggggctggctgctttgcttttctgatattcagcttgaagtttgaaccccaatatcagtttttgggtctttttattttttcttgttacactgcatgtttcatttaacaagcaaggaaaaaattttagattttattctcaaatgccaccccaattacttctgttacagaattgatcaatagtctatgaagtaggatatttctcagtagtaatcactgctcaatatatatttgtcatagtccttctgtgtgcaccatgcccacagaggctcctgtgtatcccaggcaatgtgacctgaggatctccaccccagagagcagcaagctcaaactgggttagggcaaccttgaagccaatctctttgaagaagtgttgtaacttaaagcatttggggacaacagtggttgctcttttaagcaataaggtcaaataaacaagaaaaaggcttacttatgaaaacaggaaggctccatccagaaataaggagagggctgggggtgtggctcagggtaggcctttgtttagtccgtaaagtaccttgaatttgaccctaggcaaaggagggatggggagaaaagcaggaggatggactggggagaacagagggagggcagagaaagagagagaaggggaaaggagaaggaaagaggaaggcaggcaggcaggagggagcaaggtaaagagggagggagggacaggtaagaagggagggagagagggtggagggagggagaggaaggaaaggaatggactgagctgggagaggagagtaagcaatgccaactgcaagagaaagagtcagttaggtgaccaggctctacccacttccagctggcttgggataagtcaccatcagaaacaagatggtgtgtgtgtgtatgtatgtatgtatgtatgtatgtatgtatgtatgtatgtatgtatgtatgtatacacatatgctcgagcacgtgtatgaagatacaaactcaagggcctattctcatttgcaaacccaatgttacatggtcatctaaaggtcctgaggtatgcaactgttaaccctcagccagagtttccacgcttatttgaatacaaacaaaacacttcctgccagaccattaacaccctgccaaacaagtttctctccacccaagctaggaactgtagaaaatgctttgacattttctttcttttcttaaatttattaactttctgatgttgtaatatatttttcattttacttgtttattttaatgtaattcctaattaccaaaacattctctcactttgcttgtccctctgtccaattccttatttagggacaaaagaacctagaacccctctggagttactcactgaaccccaatacccatggatgtcactggcacccattaaactctaaagatgagcggcttctcctgcaggactatgtggtgggggaggggctgccttgtttcccagtctgtagaacgaataataaaaacccagagacagatattggggtcaagctgaagatcaaagaagcaaagtggtcatctgagagctctcaccacctctaccattgctcagacagaagggtgatccaccaaacctcagatttcatctccaaactgcactgccccccaccaaatcccagactgctcctgagacttcactgaactccttatactctctctaggtctgggattaaaggcgtaaactctgtttctcttttagactgattcactctcatgtagcccagggttgccttgaactcagagatccatctgcctctgtctcctgggattaaggtgtggccactgtccagcttctatggctgtggctagctttgcactctgatgtccaggcaagctttattagataataaacaatatatccctacaccagtctgtctccaccccttgcacacaggacacttttctatgtagctcccggcttcccccatactgcagggctgtccagcagcagtctgcagtgagtcaaagtgctgactgcttttgttttgtttgtgtggtgctaggcctcacccagtctagaagaaacagtgagctgtgtgacagataggaagtaggaggtgagagtgaggctttcctctggtgggtttttgttgttactgctcttgttttggttttaaagacaaggtctcacaatgaggccctggctcgcctagatcttgcaatgtagacccagtaggggtcaagttccatgggcaatacacaccctttatttagaactatttacagacacagacccatttgggttgtaaaaactgacctccttcagttaaactggatctgaattgtatggcagctcagtggtgaatcgattgcttagcattcaagagtctctgaggtcaaccctgagtacagagggaggggagggaggccagcagactattacataaatctctagaagtcacgtctaatccatggcctaccaaccacatgtgccccaatacttatgaatgcccaacacaaaactgttaacttatttaaaacattatgaggttttttttttttttttttttttgggggggggaatctttttttgtgaccaaatgcatagttctcaggcatgacaatatcacataaaataataaaggcagggaaacccctactagtctattaaaatatttaagctgaaaactttgctcaaagtagtaatattgttccacaaatgattggtgggacgtaagtcacaaattatggttccaagaatcccaaaccttggggctagagaaacgctcagcagtcaaaaaaaatgccccccccactgcccttcgagtcttgcaaaggacccaggtttgaacccagttcacacatgattaagcaactacaccatctttaaaggtcggacactgcaggcaaagagcaaggcatcttaaatagtaaaacatttatttttttcaagacagggtttctccgtgtagccttggaggtactggaactcacgctgtaggccaggctggcctcgaactcctatcgatccacctgcctgtttcccaatgctggaattaaaggtgtgtaccaccactaacccgagacactttttaaagtaaccaaacagaatgtttagaagtcaaaagttaaagtatgagtagacaggagtgatcacagaagaaagaaatatctacaccggaagagagaatttacaaatgggaagacagacacagaggaattctgaatatatcccatatagatgaaaatatgaatccaaagttgaaagagtgagagctagagccagcaagctggctcagggccaagtctgatgatcagagttcaatcctaaaacccactaggaggaaggagagatctgactcccacaaattgtcctctgaccttcacatgtgagcatacaaacacaaaacagtgaggtctaattatcattccagaacaaggtaatgacgtaaaggaataaggaagaaatagtattaacatgactgtgtgttagtcatgtttctattactggagtaaaatacctgaaaaaagcaatttaaaaggaggaatttccaagccgggtgttggtggcacacgcctttaatcccagcactcaggaggcagaggcaaactgatctctgtgagttcgaggccaggctaggctctaaagctacacagagaaaccccgtctcgaaaaacaaacaaacaaacaaacaaaaaaaggggggggggaatttcctgttaaaagaaagcaagaagccaggcatggtggtacagttctgcagttctagcacttgggagcttgaacttaaataaatgcttctcaaaaacaaaacaacaaaggggagcaaatgagggagggaaaggtttcctacaaatcagaggtcctaggctttctttccagccccacaacttaaatgaacaaatagcaaacgttaaagtagatactttaaaaattcaaacatttaaagctgttactctcaagataaggacaacagaccagcttccaactcaccgtcttcctaccgtagcctcccaaatgctagcttacaagcctgtcccacattctggctcactgtactgccaaggttgctttgttcctgctcctgtcagtcctgactgtatagaaacagggtggttactgtgcttgagcaattgttacagtgcatacaaagggctcccaacgacagtggacaatgacaggaccactagagactctggagaaatccagtaaacacttcattccattgatgatcagtttgattctcttcgccttttcacagtagcccaggcatttggtaacttcattaactgtgcatgaaagtcccagttttcctgccagcgctcagtagtgccagctggaagcaaccattctagtcattatgcaacccttagatcctaggaattgtttgcatgatccaaggtcatacagacttttctttttctacttcttttatagccttgttttttgcagtttttagatgtatttgcccacaactcatgcatatatattactatatatctatatattactatgatcataatccctcccaattctcttctctcccctgctnnnnnnnnnnnnnnnnnnnnnnnnnnnnnnnntgctgaacggcttcttttccccatgtcccctccatgcacatgtgcccaactgcatgtaaacagaaggtggccagaagctgtcatctcctgccatgtcccacattatttttatttctaattttttgagacagcattctctaagtcgttttggctgtccttgaactgcctgcccagtaccgggattgaagacatgccaccacacccggctcccatgttattttttcagacatttcttactgaacctggagtttactgccgtttcagctgccatttccctgtgggtgctcactgcatactcagcttttatgtggatgctggggctcatacccagtttttcatgacactgcagccatttgccctgcccttcttcaagaaactttaaaaacagagataactgtcatttgcttttcttcctcaacctaaaattcagaacatgtcctctagaaagctgcctttagcttctaaaacaatctcaatgtatttgtgaaactaccgaaccagccagctgcccccacagcagcccatggtttataaagtgcccccactcgaagcactgcagggtctgttcttctctctgcattcctccatttagtgagcgtctccatcagaagactgtgtcctctgcttacaaggtttctggtctaggagttaacatgaagaagcctctgacagagttcagtcaatacaccagcaaggttcacagaaacacaaaataaaaggtgtaagtaacacacacagtacaagggactcagtgggaccactcgaatgcttttgagagccaaattcagcttgaacactatttgggaagatgttggcaaaagctgattactgtcaatgatgggatttttgttgtttttagacaggttctcacaatgtagcccagaacagactcaaactagtcatcctcctgcctcagattctccagtgctgggactaccaatgtgtgtcagccactgccaatactcaggacatcatggaagaggcgtctaagagctacagggcagagaggagtctggtgaaacatgcttttcttgtatagtcaccgcactcatcaactcccagcagctatgggtccacctctgccccgcccccacactctcactcacacacacacacacacacacacacacacacacacacacacacacacacagagtggaggggctggggcggtggtggtgcacgcctttaatcccagcacttgggagacagaagcaggtggatctctgtgagttcgagaccagcctggtctacaagagctagttccaggacaacctccaaagccacagagaaagcctgtctcaaaaaacaaaacaaaaacgaaatgaggcaggaagcccgtatgaccaaaagacattgtacacatgtgaggctgtcaaagataaaatactacttaaaatctttaaaaaacaaaacaaagggctggagagatggctcagcagttaagagcatcggctactcttgtagaagacctggatttggttcctgcactgcttaacagttcacaaccatctgtaattatagtttcagggtacctgatataacttctggcctctagggggcagcgagcaaacacagagcatacatacatacatgaggcaaaacacttgcatacactaaaatttagatcctttttaaaaaattcactaacaatagtgaaagcccgaggctcaaaacctagctctattactttccctttatagatcacctcagtgcactgattgtaaagacaaaatgaaatgtgtagtttgcacaacacctagcgtgcagctcactctgtgacaactccccagaacttcttcccaactgaagacaacctgagtggaaactgacactcattttgaatttggggagaagggtctgtttgcaataaacatctaaattgagtgttatatctggatgcattacagaatcttcagagatatgatttaggtaagatacactttgtcttctagcaaatacaaactgttgtagctgaaatgtgattctggattgtgtctacatgctgctgaagccgagatctgtcacctgggtaaccctgtctcaaaaaacaaaacaaaaaacagaaaagatgtagaaggatatcaaactgataaatgtaacgtcacagggactgcctgaaactccctcaagtgcagacaaaggcaaagcattaaagaacaaaccaagccagtagtctccttgggaaagtactccccacacatcacacagacagataagatccaatattgaatactacaaatctcactaaattctgatgagttttatacattgttacaactgagagtaattatctttttcataaagcaacactccaatactttgcatttcatacattttaatagttttatttggcaaagaggagcctaagaattttttttaaaaaacatttccagagggaacaccttttaccataaaataaattgtgatttgggaggacaaatctcaaatgtatatattttgactctgccaatcttagaattagtacaaaaaagataatttgttgaaattctttacaaatgtaaaaacaagtccaggcaacatagctatataatcttgctgtaaaagtacttatatcaaattctgcccaaaatatttttgcaatatactaaacttagtttctccagtcactcttcactgacggctggcttttccattttctgttgtctccatcctgaaaagtttagaaggggtaaaatgagatgttaaattaaaacattcactagaaatctgtatttttttttacctacttttacccattggaactaaaatctaacctattcacaacaggagagtgtgagcactttaagaaagggattgaagttcggggtcctccagtcagtccaacctcctcactgtacacatgagagaaagcagagcctgtgaagatgaggaggcctccctaagacccccctgtgaagatgaggaggcctccctaagaccccctgtgaagatgagggggcctccctaagaccccctgatccctacaccagtctgtctccaccccttgcacacaggacacttttctatgtagctcccggcttcccccatactgcagggctgtccagcctccctaagaccccctgtgaagataagggggcctccttaagaccccccactctcccatctcctccatttagtctaacagtcctacaaaaaaaattcctttaacaatatactgtaggaggatatctccttaaaactgattaaaataacgacatctgaaatttattctattctaacactttaacatagatcccatgtgtgattccccctgaaaacaatgctataagcagcagacactttcataattatgggcctttttatgagcaccaagggtctcacaggttaaggagaaagagattagctcataatagcagtttaaagaaaaactgctgaccacgagcaagcagtttgcatttcgggactaacaatcgacaaagcagtttccacaggaaattacacaaacccattttcctccttaaggtgttgatataactcagctctgttattgacagagttcagacgtccagcaaactcctggtgctttctggaattggcagtgttgattctgttactccacaaggataataaggacattggccctggtgttagagcagaaagagaaaaagttaaatgtcagacttaactctcacttcagttgttcactttacactattcaggcactgcaccacgccagaaaagtgcacagggcacttagaagaaccagccttgagggcagtgtatccaccaggcacccagctggcttgggaggatggagggggcgagtcctccccagaacacatcaaacaggcctaaggaacgaggctgatcacaacagacacaatgacttcggttgtaacacagaatgggggccatgaaggtgggagggggacatgtggggagagagcagcagcaactggggtatgattcagatacactttatacatgtatggaactgcaaaggacaaaaaagactatctcagtttctcattctaatccagtggtctatctgacacgtgaggtctataatttgtcagtggacactgatttaaatcctaacatttctaactctggcaacagcctgaggggcagatagatggagacagacttttctcttccaccatccagttccaaaataaccacacagaaacttattaattataagtgctcagccaacagctccagcttgttactagctaattcttacattttaaattaacccacatttcttatcttcgctctgctatgtggctcggtaccttttctcagtacagcaagttctcctctccacgtctcctcgtgattctgagactaatctaagttgaatgggagtggttcctgtgatgactccagcacaaagcaaggatgggtctatagtacagaactctgcatctctcttttctgttttccatggtttgtttcttctctttatatatcaaaacttattctagtctaaattttgttaacagaagcctcaacatacatatgaagtaatagaaactataagaaatacaccccatgttgggtgccatatgtagttagacttttctttcccaccggacagttctcaaataaccacacagacttaccataaattataagtgcccggccaatagctcaggcttgttacttgctaattcttgcattttaaattagtctgtatttgttactgtatgtgctgtctcctggctcacagctcgttacctcatcttctacaggtcttgcttctcctgctcctgctccagactccagcctccctcccagttctcagactggctctcccacctgacctcttcctgcctagctactgtgcagtcagctctttattggagcaatgagagcagcacaccctcacggtgcacaaaagggtcgtcccacagcaggcagacaccagaggaccatcaaggtgacctcggagtcccaactgcaaggaaaccggggaactgaagcgtcagtgtgtcccaagcctgctcctagcaagacttgccaacagacagcacgtgaggccgccctgctcttgtccaggacacacaggcacaggcgccagagagtgacctgagcccaggtgatctccaaggacactgaggcccagaaggacatcaggaacttgagtccaagtcccatccttttagacctagaattacttcaggaggaaattaagcttctcagcctataaataagatggaaagttttatggtaaaaatatggtttataacaatatctttacttaagctcggtcaggacccatcttagtttagcactaaatgagcatcaccacactcctcgctggataccaagagctgggtggagggacgacagcacacacctttcttctcacatatacaatctacagactttttatgtgtatgtacaaacatacatgaaagtggaaggcagtgacttgggagaagagggaaccgttgaggggagagcagggacaagacagcgctgtatgtagaagagaattatgaacaacacaccatgatgtatgggaatcaagtgtcagaatcaaacccctgactttgctcatgagtggggaaaatgtaatgacaaagggctgaggggagtctgtctccgtaagcagcacctggcacttcaggctcaagtagatttaagcttctagtttttctagtttacaattcctttcctacagacttcacacaaagcatttgttttcaaagccttcactatagagaatactgttactattcttcttttcctcctccttttttttttttaaagatttatttattatacacacagtttctgtctgcatatatccctgcgcaccagaagagggcactagatctcattgcacatggttgtgagccaccatgtgggtgctgggaattgaactcgggacctctggaagagcagctggtgctcttaacctctgagccatctctccagccccctcctcctttttctttttcttttttttttttaaatgttacaaatgtcttcccttccaaggctgtgaacggagtctcctgtctggtgtctagacatcaggagctctctcacagacagtgtcaagtgatactgcacacaagagctctgctgaaaactgcctggctccgggggctatcctcacctttagacttttccatgtgtggcgtctcatccatttcaacaaggggctttttgtttggtggttctggggaatcaggtgagtcctttataacctctgcttcggccaactcttctttccctcgttctaaaatacctttcaaccttgcagagacagataatgaagccaagtttaatttacaagtctgtaaattgcccagtaagtacactatctgtatatcagttttcataaaatatctgatctcacaaaagaatctaaaactcatataaaagaatttaatgagttcaacacaactttacttccctttatagcagtcacagttcagggattagtaagataaaaaggaaaactaaaccagacaggaatttaagttaatatttaaaagttagaaacaatgtaataaccaaaagacgtttcacattttaaaaacaaggaaaagaaatgtattcaaattacaaataagattatgacttattgccatgtgtggtgtggtctatgtaatggggaatgtatttaggtttcattacttgggagcctcactctaaagttatttttttcttcaggtaagatctcactatacaggcccggctgcctgaaactcatcgcacagaccaggctgacttcaagctcacaagtgctggggttaaaggccgtactccagcttttagtaggcttcttcagtaagataagcacgtctcagacatgcacaagtcgtatgctgaaggtcagttggggccacagtagtttttttccttttcctacagttgaaactgctgagacgccaagtgttccacctgtctggtagtgagtgaatggcttccagagctactctcaatgccctttctagagagcagtggtgacggcagcagatgtgggaactggtgtgtgtgagcagaggtctgctacaagttagcaactgtgaaggcagagcccatttgtttgttatacaggtatgtgtgtttggaattttctataatgccactacaatacttacctaactgtcttgcctgattggtagcaaggagatagaaggtgatacatttatgatatgtgttaacctttaaaactttttaattgggggtggggacaataaatgcacaatggcgtgtgtgaaggtcaaaggtgagagggcagcctacaggagtcagttctcacccagggcctcaaccattcttactgcacgagccatctgctggccacattctaacattttatgactctttatggtttttataactttaaccttgatgtcactaaggggaagcagtatgcagctctggaatgatgtcagaattaggactgtgagttcatctgctccaaagggcagcctgcacctaattcctgtaagattgtgccttccacactttgctgtgaccactcaactgtggcctgtctctaacataaggcagagcattcttttaggatgggatcttgggacaaatgcctaggcaaatcactcaacataaaattatacttttgaattttacaatagtcatagtgcacactggcatcaatcgtcataataatagccaggaactagttaggaaaaattaacacagtttttgccctaaagtaaaaagatgctgtgtctaataaaagtgcaggtacagatggacaagcctgcgttggatggactgggtgtgtgtgccacggcaaaggcgccagctaacagaaccagtcacctgtctgagtctggccgcggcttctccggcccatgctccttcgccgcctgctccgacttgtcctccctgtcctccctcttcctccctcgcttcttccgctcctcttcttcggggggtttgctccgacacgccatcagacactccaggaccctctgatgcttctcggagttgctgacatgggctctgacaagcgtttctaactcgttccacatgatgcggtactgctcgtctctggaggaaaggtcggacaacgcattctcagaaccgctccttgtgttcacacacgaaacgctaacggacaaggcgttttcagaaacgctccttgtgtttacatacgaaacgctaacggacaacgcattctcagaaccgctccttgtgttcacacacgaaacgctaacggacaaggcgttctcagaaacgctccttgtgttcacacacgaaacgctaacggacaaggcgttctcagaaccgctccttgtgtttacacatccaaacgctaaagctactgaccccacctgctacggcaaaggagacagaagtagagacatgtttatttccttttacccatagttaatggtggaattccaagttatattgaagcagtgcctactttcctatgtctccatcgtacctatactatatgtacacactcatccatcccctcagacaatgtgcacatggagaatcatctgacaaaataacacccattaagtaagcatgatgtgtgaagaaaacagcactaccttttagggccctttcctctggtaccaactgtagaaataggaagggggtcatttttcctttccatatcaaccaagttgtatatcgtcttttgacagtttagcacgtcttcttctgtcaaagactctttcacaataacactggctaatggaactacctgtaaggttaaaaaaacaacaggaagaaaagagaaagaaaatctgtcttgaaaaacaagcatcaaggcgttaaggacaaagttggtttaatgctaatggttcgaggaccacaggaaggggacccataactgctgcttctgccctgagtcactaattcttcagccacaacaaacacatgctttctttcttgcttgaggaatggcaccaattacaaacttttaaaaatttttctacaaatatatttctaaatacacactaatctagaaaagagcaaaacaagactcaccgcttgcatgttgaaaatggtggtttgtgaaataatcatgggccagtaacgagtgtgcttttctaactggtcctttgcacgttccagcgggatctctagacttgcatccattttatatctggggtctagaaaaggagttaacctgttttccctcataaattcaccaaaatcctaatgataaccagataagacacaattagaaactaatctagtgttgcagcacgggttacatctgacagtcatttccctcatgtcctctgtgactgtcagcacagccctctctctaacaggggccccgcctcactgctcaccctgcccccacttcattcctaggacttcactgctttctttcagatgtgcgtgcattaatcacagcacagtttgcttatgaaaaagctgctttgatagaacgtcaaaataatgagtgttaatctttgaataatgtaattataggtaaattagggtttttgtttggtgtttagatgtttgtatgttctcagttttctctaatagatactgattggcttttagtcccttaaaaataattacccaaaaaagcctaataattaaattataaaatacttggtggtttatcaagtgtagttatatacataaattaacatttaagttccaccatcatctcaaaaactagccatgaaatatcaatatatgcaaaggaaagcactagtttaatcttccctcttctctgtaactccagtgttgcagaacccagacaattcccagtcgctgaacgtatcatacagcagagaggacacacagtgatgtcagttatggaaacaacccacttctttgagacggccttgccgtaaccttaacatgtaccaaaaactcttgctaactgactcaaaacaaagtctacagataataaagctgtacaccagggctggagagacgctcagtggctcagagcactagctgctctttcagaagacccaggttagattttagcatccacaccatggctcacaactgtctttaactccagctccagagtacccaacagcctcttctggcccccaaaggtaccatgcatgcacaaagcgcacaaacatacaaacaggccaaacacacataaaataaacatgtttccaaagtctcactgtaatccggtagtctgtcactcttcctccacagccttcactgatggaaggcggatcttctagaatggatcgagagctgctgaggacatgcagaaagatctctcctccatggctgctaagcatgtggctgatgactttggaacctgactttctcggctgctccaacaacacagagcgacctgtcagaagcaagatgaagctgttggtaacaaaattcaaacagctcacatttacctagcacggctaggctagtgtatctacacattcccaacacttagcttctgtcagaatccttaaagtttacataattatatagtttcccaaaggtaattataatggcatatttgtatgctttactcaatctcaagttcacataaaaatttcctcatagaaacttaaaataaaattctcaggttattaatgctgcaagtatttgagggaaaggcacgatctcaatgccttctacagagtgactaccttgctagcatagttgtttttaagtttctacttcacatgccaaatgctactgaatttggactttacatattctgataatcaaactgtttaacaatgaaaagaaccttccaaaaaacgacatttttaaaactcaatagttccaaaacttaagattatcttgctaccagaagagctttgaaaatttaaatttagaagacagaagttaatagttgagctgtaaataaataaaatgaaccataaattttaggtctgggtaagaatcatatggtacgatactgaaaatataatatttagatacaatgaaggtgaagcattcaaagaaacctcagttcacatacagtatgtaattcagtgggcccaaggtgaaggtctgctattccagcttccaagagcgccaagtcagactttaaaaaccaaaacttcaataaaattcttaaaaccatgttgggaaaacttaagatataatagtctggaagtcataaagaaaatccttttttctgacccttagcaaaacttgttaaggctatttccaaatgtgtgagtttaaaacaattttggcaaatagatcagagtgacactgatgactccacttaatagtaattgcaattaagacactgaatattgaaaattaccattgagaagaaaattagtgaggcaggaagaaggtctactatttacatctactggtgaaattcgatatgctccagtgcaatagtgtagttctgaaatagaagaaaacactgatttgaaagaacgtaatgaaatagcctacagttcaaaacaacaaagtttgttctgtctatgtctgtctctcctctctccctctccttccaccaacaaaattccccaattagaaagagagagagcgagcgagccagagagctcttgtcctcctggccctgtctactcaccgatgctgttggtcctgggtgtgcaccacttcagggttaccgtctctttaaatggaccttctctactgctgccacctgagtgggtatcaccttcagaaaggtcacagaaacactaactttactaaagaggtcaccaccttcagagtgacaatttttaagttttcaaaataagcttaagctctggaagagagaggagctcaagnnnnnnnnnnnnnnnnnnnnnnnnnnnnnnnnnnnnnnnnnnnnnnnnnnnnnnnnnnnnnnnnnnnnnnnnnnnnnnnnnnnnnnnnnnnnnnnnnnnnnnnnnnnnnnnnnnnnnnnnnnnnnnnnnnnnnnnnnnnnnnnnnnnnggaaaaaagtccatgtagaggatagatataaactacaattaacatcaataattaatgtcccttcaaatttttcattttattgtttcattcaccaatttaattaatttaggttgctgcttcaatagccaataaaaaaagctttacaggcctcaaacaccgcaaccctctctccgcccacaccaataaatgctaagtatagacaatgctcagaagggtgaaaagtctaagatgacacgtaaaccccagtgtgcttctcagaggaccacgatgttctgagtgaaaacctgagaagacagcgcagcacctttgccctcatggaacctgcagggcgtagggcagacttgtcagccaaacagtggacaaatctgaggtcacagagttgacaaagtgttgaagaagaggctacagggcgctacgagagcctctctagacactgtgaagaagcctccttcagatagttgggaaggtcggctaagttctcagaggacagcgagaaatgaaagagaggaagaggaagccacgtggtctgcgcaacaccagagccatgagaacacggtgcattgctctcagttcaccttcttccctgggaggccgggtgaggaaataaccggctgcagtcagggagcgactaacagcagccaagatacagtatggttgtatctgagacacatgacgaaatcaagcatgatacagttgatttaaaaagtgtcagagagacagagactgtgggagtagacaacaaataactggtctagcctgagacctgtggcattcttgagagtgggccacccttgacactgcctggaactcctagacccagaagctggctgacccagagatacaggatagaacacacaggactggcataaaaagaaaatgatgcctaatgacaccctgctacatgcatagatcagtgcctaagccaaactgtcttcagagaggcttcgtccagcaactggtgggaaccctgcacaagggggtgagaaaggactgtaggagccagaggggtcaaatacactacgagaaaacccacagaaccaactctcctgggcccacaggggctcacagagactgaactgacaaccatggaggatgcatgagactgacctaggccctctgcatatatgtgacagctgtgtagcttggtcttctggtggggcttttgggatcctattcctcatactgggctgctttgcccagcctcaatacaaggggaggtgcttagtcttactacaatttgatatgccatgttttgtccagacccatgggagtcctgcccttttctgaacaggaaggggggggtagcaggaggcagaggagaggtggagtagggactagaagaggagggaagggaaactgatgtggggatgtcaggcaattcaaagatgatcttgaggtttccgtctaacataaatgcaaaaacacctggacgaaatgtccactgaaaagtgctaagtgccagtcagagagctcaccaattgttctgggggcgctgacatcaggcagcagaatgtacagatatggagcttaagggagatagatgcctgggctaacgtacagagatcccgctcagtcccacccaagtgaggcttacctaactcccagatcataaccacatgcagcctctaagtgccacaggagcactctgcagcacgagtatgaacactgtattcacttacgcacacctctgtgtaatgtacaggcacagggctcaggtcctaatgccacaggagcactctgtacgagtatgaagactttttacttatgcacatgggacccgcctgtctctgctcctcactgtggcttttcagacatctcataggcgttggagattgaccttgggtccttttgctctcacagcaagtgctcttacccaccatgccatctccacagacaagaaatagtttcatagccaaggctatgttatacactcttctgagtcaaaataaaaaatcttaaaagctggtatcatctcatgggttcctagcaatcgccttgagttatatatttttttcttttttctttttctttttttttttttttttttttaacaaggtttctctgtggctttggagcctatcctggaactagctcttgtagaccaggctggcctcgaactcacagagatccacctgcctctgcctccccagtgctgggactaaaggcgtgcgccaccaccgcccggctgagttatattttcaacatcaagttctctacattcccttactaaacatcagcagatacattaatcacagcagtttctctctagctagtaattcaatcaccgaatctgaatatcccttagacacgcaaccagtgccccagctggctcacaatcatgcttcataatggatgcacaccactgctcaacatcaatcctataatcctatcagcatcagtctacaacgtcaaaccttacaatgtcatacagctttaggagtcaatgaaatattacgattcatgctgctgcagcatctgcaatttttaaacaaagaaagtgaagcacagaagcacagacctttactaaagctcttccctcctaccctgaagcacgtaggtacagtgatggaaaccacagcttggagatgaaagtaaactttcatctttcatttacagaatatgagttcatggtcactctcccagcttgctttctgctgctgtgataagcactgtgacctaaagagcttgggggagtaacgggctcacttccgcttgtcagttagagtccatcatcacagaagccaaagcaggagctcattaagaatctgaaggcagaaactgaggaagaggccatggaggagggctgtttcccttggcctgctaggctacctttctcagacataccccagacccacgtgcccagggaccccaaagtgggctgggccctactgcatcaattagcaattaagaaaatgccccacagacatgctgtggtagtttggatgtaattggcccccataagctgagggagtgatattatttggaggtgtgaccttgttggagcaggtgtggccgtgttggagagtgtgtctctgtggggtgggctgtaggtctcctgtgctcaagctatgcctacttcagctcactttctaaagctgcttgtggatcatgatggagcactctcagcaccatgtctgcgtgcacgccactgtgtcctgtcaccttggtaacagactaagcctctgaactgtaagccaccccaatgaaatgcttccttttacaagagttaccatggtcatggtatctcttcacagcaacaggaaccgtaactaactaagacacatgcctacagaccaatctgatgaaagcacttttccaattgagataccctcttccaggtggatctaatttgtgtcaagttgacaaaaatcatgatgttgacattgtagaggagtctggacaaagacgagctcagtctatgtgctaggctaggacacttggtcggcctcttaccacttctgaggaaatctacgtgcgcgtctttgtggtgaagtagctccacgtcgtagttggcggatgtgttggcgtgctgctcttcctttaagcaaagtgtaagacattttaataaattgggtttgctttcaaaagaatcacataaattaccatggttttttttttttatttgctaaaagtgaggtaaatacattctgccacagttaactaaataagagaatggtttgcccagtcacttatttaaagatgcaacacattccatcagtgtaataaactctagaactattagctgaacacaggcactgaggtaatgactgtttcatgttcagaactaacacaaatgattctcctagaaattttgaatctgtttaaccacaaattcattttcttgccagttgtttgtatacctaatataaaatcattgaaatatatgtaagtcaaacttaaaaagttgttagaaacagtacctaaacaatagcatctttaaatacttgcagtgagttaatgcacaccacttgtttaaaggagcaaacactagcaaacaagcgtagtagcttgtttttggcatcatccattaacagagagaacagactacagatcaagtgtcaggtccaacaagcaagctgtctctgccttcccagcatgtctcttacacacagatacaagctagggctggttacactactgtgtaacaccaaagccactctaatggctctcctagaactcctagtaaagagccagccaatgaggtcgggaggacatgaaaagtgaaaagctaagagttctctctcatccaacttagtatccatgggatgatagcaaaagaactgaaaacaaagctgggcactgtaattcacatctgtgatcccagcactatagaggctagggcaggaagagcccatgtttcaagtcagtgtagactataaagtgaaaccctgtcccaaaaaaagaagcaaaaaagaaaaaaaatgaaaccggactccaagaaagtcaccatgaattttttggtaagcgtagtaactgtatggactgaatttcagtaacgactcattcaaagctaactatgggccagtcattttgctggtcctgacaacaggaatagtgacagattcccagaaaatctacttctgaaactgagccctcatatccacggctctttacctgaggagcactacatcaactggaagccaggaggagtttttcattagtcagacctagtacttatccacaccttcacatttggatgggtaagaatgaaagcataggaaataaaagatccactcaaatatacacagtgaaatctagtaacacagctctcaggaaaagaatcacagagaaataatttaaaatatagattttggtaaaaatagtaagaacatagttcttaaaaaaatctcacatgatatgttcttattagaaacagtgacaatacaacatttgttctgtgatcctttctttctgattctcagtatttactgacctgttcaaagacactgaatgtgggctagcaaaacaaaatataatacagggagaaaaagtaaaggttcaattaaagccaataaggaacgtcaagcaaatcatcacagagcacaaaagggctgtcaagcagaccacctaccttcatgggaatgttggtgatggtggtcgaggccaagtcaaaatgctgctgcaccagaacattcagcttggtagcgaggtgccgcccagctcggacactgtggacttcactggtcaaaacgggggagagctgcaggagagcacccaggagagatgacccacagagcactcaccactccacagtagccccgtgctgagtctcgagtggctttttacaatgtgcatggggtgggggtgagtgggggaggagtgtaaaagccagccaggagaattatttcaccaatgagttgcatccgtaacatatataatctgtttactatactgtaagccaggaatgatgtgagccatgagtccaccacagcacagacagtcactgtcctcttaaaacctagacttagcacgcactcaccacatacatgctgatagttctaactgattgatatgaaaacagaagtgaaaatcacacagagatacaaactgctgataaaattaagaaggaacatgaaaatcaccacaagatctggcttcatcaccagcaggaggtctggtagcaaaaagtactgtaaagctcagcagggagagcgtggtgacctttaacctttagccccagtacccaccaggcagaggcaggccggtggactacacagagaaatcctgtctcaaaaacaaaagtacagtacactaacaaaatgttattcatgtaacagtggacatggtttaaataaaaaatgcaaaacaaaacgttagaatatgctattatacattgacgacggttaactacgtaaatggacagctttacatttctaaatacagactaccaatgaagatgtgatgtgaatatacttactaaccaacaaaattatcttttcatttacaatatctttatttctttttttaaagtaaaagttataaagtaggtttttccctgaatgtttcagttggtttctttgttatcagagggtatttcattagtatgtagttttctcaaaatgggtaaaaattcaagttactgaagtaactaaacttcacagactggaataaagagtttatagacttgcaacacattatattaaaataaatgtcgatgatgaggcaaaacagagacatgtaatgtttgtaattacaagtctattctgtattttcagactttcaagtactttcttggcaggaaaaaccagcaatgtcatcaggcaactgctgtcaccctaagtgctgctaactccagctcacaaccctgtcctctgcagtaggaacatccacacttacttcttttttaggacggtcagacacaaggctatcttcaccaaccgggtaggtgtgaatcaagaccaactcacatttttgaatctgcatgagacttaaaaaaaaaaaaaaaactttcacttaaaaggtttttttttttttttactgtgaagaattcagcaagcaaactactggacctcatcatgataaacagtgtaagcccatgagcataccaacactcccagctaagcagccacacggtacacaactgctgtacttgtataaatacccaatgaataattacacatttaaatgaaacgcaagacttttctgtgtatttaataatgcacaccctgatggtaggtgccagggccctgctttcaactgaagccactgaggcaactctactactaccgccactaaaagacattctgtggagtaagaagctgagaggtagccaactatgtgacaatctctgtatagtaaaaaatgtttaaagttaaaaagtaacaacaaagagaaaggtcttacaattttctgtaattagcacaaaaaaatgagtatctacatattgcatttctttacttttttttgaggacaaaaatcaggcaatcctaatcactacctataaatgattacttctaagaatatgagactaaaaattttctgttttttaaaattgtatttttacttatttaggaacacatgcaagtgagactaacatgggggagtctttccttctaccagaggttctgaattcctgttgtcagacttggaaccacctcaccagcccttccctagccttgtattcagaagaaaactgacagtagcatattcaacgaaaatccatgtattctacactgtacattacataattcactgttagctacatttctgttctttctgactctgaataaatgaacaaatgtttcctactcagtgtgctggtttgaatgtaactggcctccataagctcagggagtgatattatttggaggtgtggccgtgttggagagtgtgtcactgtggggtgggctttaggtctcctctgctcaagctatgcctacttcagttcactttctgttgcctgtggatcatgatggagcactctcagctccttctccagcaccatgtctgcatgcacgccaccatggtaacaaactaagcatctgaactgtaagccatcccaatgaaatgctttcctccgtaagagttactgtggtcacggtgtctctgcacagtaatagaaaccctaactgagacactgagccattctcatgtgaactgtaaaggacattactaaacacctgagaacccttctactaaggatagtttcactcctaatagcaatgcccctattccatataagaaaattagtaactgctcaatctaaactgcagtccagtacaactgctgtaaacacgcccttattggctgtaatgtaacaggtaaacatttggactactgacctagcagatgggataagagttcctgaaacccttataaagtcctaagtactatggcaccagcagtatcttccaccctttatttgatcttggatctaggttcttgaccattggttcttaaccctctggaatctcctaggtggtagcccctctgtgctaatgatctaactcttgggattctccacctgtggttcctacatgggggaagacattaacagaaagacaatgctataattagaagcttgggacctttaagccctaccctgccatccttgagaaaggaaacaggggccagaaaataaataaccagtcgtgcttgtgtgacatctccataaaagtctcagagacaaagggctcatggattgtcttactttggtttccattgctctgaagagacaccatcaccatggcaactcttataaaagaaacatttaattggggtcatttgctcacagtgcagagttcagcccattatcatcatgaagggagcacggtcaggcaagcgggatggtggctacacttggcttgtaggcaacaggaagctgactgaggcactgggcagtatcctgagcataggaaacctcatagccccctcccccacagtgacacacttccttcaacaaggccacccgcactctaacaaaccacacctcatagagccactccttatgagattacaccacagggatgtcctgtgaacacatgcaccctctgtgaaaacaggacatccatctccaagaggtgaaagctcctgcacttgggacttgccctgtttgtggtgcttcccctacttcatctgtatctttgtaacacactaacacagtctgacatgatggggttgtgggaacacctgatgactagcaagccagactgacagtggttctgaaaggatggagatgcaatgctgaggatctgagctcttaatgtgcaggtgctgtagtaactctagcgagctgatgtctcaattgaacggaagcaccccaggattggtgtcctggcagaactgtctgatgtagaaaaaaaacacccaacagttttgatcatcactaaatactgctgtgagtatcaagcaagtataaagcagtttttcaactgctattattaaaaaaataaattcacacaatgcaatgagtgaacctatttacattttgaactagtgagtaatgattaataacacccacaacttgcatattttataagttcctagcaaggtatgataatgagctctcaaaacaaatatactttataaatttgcatatcattttatcattctgagcacctttcttgtgagaagaaatattctaaaatgtaaggaaaataaaaaaaatctgatcaaacttatagctttaggctagtaagaaaaatcaaggaaatgctaccaaatacagtaaaaattattccaagcaaatatgaaatacacatcatgtgacgttaaagacagctatttcatctctgaattatactcactgatctgaatttgcagcaagcttgttatgctcatgaattgtttcttggacacagtcttcaagcatgcgtacatgactatcactgttattaaaaaaagagaaaacttagaggaacaaacagtaagaaaaaagtcaaagccactactcagctgcaggatgctgatactggcatttaaaattacttcagcagggcctggaggtgtgctcagaggtgaagagcaagtgcacctgtactcgtgtgcacaagacccacatacagacacatatgtacacagaatgccaaaaatttacttcagcaaagattgtcttaagcatattcatttataatatcaaactgttagctaaaaaaccagtgaagaaagtcttatcaatttacataataatctagacaattttcaccaagacgatttttttcagacagttttgctctgtagccctggctggcctagaactcactacttaggctacactggccttaaactcagagtgatcttctgatccctgcttctgaagtactaggattgcaggtgtgtatgagcatatgcagcttatcaagatggatttttatctagaacccaataagcctggtatcaatattcaaggcaaacaataacgggattagcagcccacctttttgcatttgtaatacagatgattcgtcctctattcccaactcgctctgcattctccatgagtaacgttcgagcctcatgttggtactcagtgattttgcacagggtctccacggctgcgacaagcccatgcagaatgctgcagcactcagggtctgcccgagggttaggggggcccacagtagccagtgctgccatgagctaagcaaagggagagacaaccatgctgacaacagtatgacatgcgagacaaaaacttcctgagaaaacaacaaaccaacacttctgaaaatgggctggagagatggctcagcagttaagagcactggctgctctcacaacagaccggggttcaattcccagcactcacaggacagttcacaatcgtctataactccagttccaagggatccacaccctcagaaataaatgacaaaacaccaatgcacataaaataaaaaacaaatcatttagatatgtacatatggatacaaactcacttaacaagatactagcaagccaaatataacaacacacacacacacacattatacatcataaccatggaagatttctgtcaagaatgaaagttaatttagtatcaagtagggaggggaggagaggaggggttatgggaggcaatatgggtggggagagacgactagaattaaggcatatttgaagggtaatatggaaacctaatacagtagaaaacttgctaaaatgcagacatatggagatgatctaagtgaaaactccaaataatggggcagacagagtcccaagtggccatctcttgtcacccagtgaagcatccaggaccaggactgagttacatctaaatgagttgtttggcaaaggggccccatgggaatccccaaacaacctgggctgttgccaagactgtaagttactctccaaaaactgacagcaaggtcccactgctgtaagcaacaacacactgcacatggatatgttgagctggtgctctcaaaacaccaagatctttcatctacaatggtatacttcttgcaagataggctagggtaatggtggcacaaagcattcgggaataaccaatcaataactgatttgacttaagacccattccatgaaatagaacccatacctgaccaagaacctgagactaagccaggcgttggttgcacacgcctttaaccccagcactcgggaggcagaggcaggtggatctttgtgagttcgaggtcagcctggtctccagagcgagtgccaggataggctccaaagccacacagagaaaccatgtctcgaaaaaccaaaaaagaacctgagactagagagtcagggacctagggtaaaaccaaatagacatatgtagtgatgaatgactcctaaatatttgccaccagctgacttcactccttattcatgaggatttctgacaactagttgtgataaggataaccaaatacaatgcactacatacacttgacacaaaagcatcttcaacatcagtgactttcgagagtggcccttacagtggagtttcctcatgacatactcaaaacttcagagtattgaaagaggtattaaagaagggttcctcccaacactggatactcacgtaatttgcttgactgagaatgttgggtttgggtttttgagacagcatctgctgtagcacaggctaccctcaaccttactatgtatgtagtctagactgaccttgaactcctgacactccctgcccattccttctgaatgctggggtttaaggactgtgctatcaggcccagcaacttttcacagtcatatgctattagatagaccgcagtagtgcagaaaagggagatgtgtgcacatatgtgttgactgttttgttttgttttttgagacggggtttctaacacatagaccacagagcacagcagagcacaaggacaggccctgggctagccctgcccagcagagtgtcatcaaatgtcctgtcccatctatcttcctgtggcttactaagcacagacacacggcaaaggctgcaaaagagccatggtttaaattttacatcaccacacaaagctggaactattctcagatagctaagtgctacattaaaagtagcaagattagccgggcggtgatgccgcacgcctttaatcccagcactcaggaggcagaggcaagcggatctctgtgagttcgagaccagcctggtctacaagagctagttccagggcagcctccaaagccacagggaaaccttgtctcgaaagaaaagaaaaaaaaaagccaaccccccccccaaaaaagtagcaagattaactccaccttctgagtccacctgtgagtggcagaacttgacagtgaagttcacagcacataggagaccttgggggtggggggttccaaagagaccatctggtgactgtgacattttgaggttccttcagaaaaacaactggcttataccacagtgaagcccacaactgagggtcttctaacccaatggtcagtgccgtgctgataggcaagactgcacagccaaaagtcagcaggcatgcaagtaaaacctcaacatgaaaagaactctggaaacagagatcaaaactgatcctcaaataaacccttaactacctcagttgtaaaatacatatacaaccataaaacaagactgacaaaaaggatatagagtacaagaacaagctcttagaaattaaaatagtcaaataaaaacttccaaatagatagataacacaggttcaaatagataaataaagaaaaatgactttaacccagaaagtccaatatcctactaatagatattctagaaagacacagaatacagacacaagaacaagatcaaacatacaactcagaatttcccacctagcaaatcagaaaagacccgctaaggaacatcattgaaaatgttcagaatataaacgaggaaagaaaagactcttaaagccttcggaatttaaataaactgacactggacttcttcagcagcgtcagcggaagtctggacatagcggtgtttgagaaaatactacttttatgttcaaactatggatacaaagacccacgttccatgaacggcagaggccatcctccagcagacaaagaccacacagaggaaacgctgccatgagaaagcacaagaggatgctgaggcgcagagggtggggactgtgcttcaggaaactgctgaagtaactgatacatttgtggtaaaagaaatacggagaagctttgagagacgtgagcaacaacaggtatgtaagtaggaaaaggaaatggggagttctaaaataaatagtcataaatactatttggcatagcagtgagcaacacttttatggatatacatattctatatacacagaattctaaacagaaattctgatagaatgattagaaaaaaatgagggaaaggcatgagccaggaagggtcttggtaaatcatcactaacaataaggataaagtttaaattaagaatgcaataaataaaacgtggtacgcagtcattatgcttaacatgtaaattaagaaccagaagctagagctgagatttgcttggaacggaaagagcagtttttctttccatgcaacctgggattttaactttgcaaagatacagaaattcttagaaaaaaaaaattaatcattcttctaagtttgaccacatttaggtaattttcaaaacccaggcatacctcctgtaagttctggtcttcttgagtccaagaattcagaacatgtgccccggagtcactcacaatgaaattcacctaacagatatcaaagagacaaatcagtattcaactctcacactgtaaaataacaccaattcctaacactggcaactatctgatccatgttctctaagtgtgaatgcccagggcatgtagctgctattcaggcactgagtatacatacgggaatgtagtcatagatcagacagttctgcacagcatggagaatgtctgcgtgggcaatgaggtaatgcagtgaaagaaaacacagcaaacaaatgagcaggagaatctcagagaatagtaaatgttgtgagaaacaacttggttcactagtcggatcaggcggtgagagacggacgggctctccacagaagcagcgactgagagaactccaaattgactattgaacaggtcacacaataagccagggacagataatttcaagtacggcaaacagaagacgaaatggtctttaaatttaaatgcaaacccaaaaaggcaaaaatccctaaaaaagcagagggtttggagagaagcctgaagaaacaggaggaactctgaaggccatacaaggaactgacagccaaataatggacatcaactacactccttccttttccctcggtaaaatacagatttaaaaactgctataagggatgaaaatgcagtccagtgctgtagtgcttcctggcatgcagtgtgaggctggaacctagcaccacaaaacaaagccctgtcaggtatgaggaggacctctgctgggtcccagctcaggctgctgcatttaagaagaccagcacttgccatctaacatttaaaatactgaaacctaaaggtggctttaatatttggaatttctgtcaaatgtctatgtctcttcttactaattaacacacagacacacacacagagagactttttagctttttggaactgggaaggtggtgcatgtctttaatcccaccacttgagaggcagaaggaggcagatctctgagtctgaggccagcctggtctatccagagtgagctctagggacggctaggcatacaaaataaaaacccctcaaccttccttccacgtgagacaccagtagttctctaaatctagtgcctgttccaaacttgctgcgtacctgtgtacatagtatgcatagtatgcatagcatgcatagtactcacctccttggactgtttatagccagtacacataaagtgtaagtacaaatagaaagcgctttgtaacccacctacaactcttaagtgtgcagaacccatcagcatcgtactgctggtcatacttaaatgcccatacggtaataatcaaaggggcagttaagtttgcatagacagctacagatctacagcaatgtctcgtcactatctacacaattaaacagttttctgacactcaccagcttcttgaaagggaatatatcatacattatcctacaatattccatggaagactccactgagcaagtccacagggacttggagatgggagccaaggggatgatccctggggtcctgttcttcaccagcatgtcaaactccacatgctgtctgcatgactctgccatgtacgggcagtgatccacaacaaacaccgtcttgtgagactcagaaaaaatcctcattgtgcttcaatctgtaaaagggtaaacatactagtcaaatgtttgatacataacacacatcacttaggtgtgtcttcctcgacatttggtggtgagcctgacttaagtcccgagaattctgttcaagcaagggcaagggttatggtgcccagttccaagggatgagctacagcgtcctatatatgcagtcagtttaccagacaaaacgaatccttaactctttttttttccccttttacaaagtacttaaaacagagagagagagagagagagagagagagagggatacatttgacgctgaccctcgctaggggctcaggggtaaaaaaaatcccacaggagaagacggacagcaaaaatacaacccaaaatccagacacacatcttccgaggtaactgcatactcggggggggggggagtcttccccacacggagcccaaaccctcatcctccccatgcaacttgcaacagagcgcagtggattcaccgcggtccttcaaacaaaccgatgcccgggaggaaacgctcctgaaactttttccttacagacacagaacaggcggtgcactccccccgccctcacccccaccagcctgcaaaacgtggtacgcagtcattatgcttaacatgtaaattaagaaccagaagctagagctgagatttgcttggaacggaaagagcagtttttctttccatgcaacctgggattttaactttgcaaagatacagaaattcttagaaaaaaaaaattaatcattcttctaagtttgaccacatttaggtaattttctcgcgatgcatgcatgcacgcacgcccagcaatgcatgcaatgcacacgcctgcctgcctgcctgcaacggggtgggatgcaagcaacgcacacagctggctgcaatggttgtgcggggtgcaaggtgcgcggacccgggggaagccctgggccgcgaggcgcgcttactttcgtgcctggtcctgcagcaaacgcacggaggccgcgggagaagcccggcgagggcggcgggcnnnnnnnnnnnnnnnnnnnnnnnnnnnnnnnnnnnnnnnnnnnnnnnnnnnnnnnnnnnnnnnnnnnnnnnnnnnnnnnnnnnnnnnnnnnnnnnnnnnnnnnnnnnnnnnnnnnnnnnnnnnnnnnnnnnnnnnnnnnnnnnnnnnnnnnnnnnnnnnnnnnnnnnnnnnnnnnnnnnnnnnnnnnnnnnnnnnnnnnnnnnnnnnnnnnnnnnnnnnnnnnnnnnnnnnnnnnnnnnnnnnnnnnnnnnnnnnnnnnnnnnnnnnnnnnnnnnnnnnnnnnnnnnnnnnnnnnnnnnnnnnnnnnnnnnnnnnnnnnnnnnnnnnnnnnnnnnnnnnnnnnnnnnnnnnnnnnnnnnnnnnnnncggcggggggtgggcgccgccggcgggtttcccccgcgctcaggggcggccggcaccgttccgagcccgcggcgcccgacccggtccggctccggtggaggaaccggtttccttccgagagagcttcgagtgcgcgtgccccggctccccagcagtgcgggtccccgctttcagggcgatgtgtgagtgtgtgtgtgcacagaagctgtgtgtgtgtgcacagaagctgtgtgtgtgtgtgtgcacaagcttaggtgcgtgtgcacaagctgtgtgtgtgtgtgtgcacagaagctgtgtgtgtgtgcacagaagctgtctgtgcacaagctgtgtgtgtgtgcacagaagctgtgtgtgtgtgtgcacaagcttaggtgcgtgtgcacaagctgtgtgtgtgtgtgtgtgcacaagcagtgcgtgtatgtgtgtgtgcacagaagctgtgtgtgtgtacacaagcttaggtgtgtgtgtttacaagctgtgtgtgtgcacagaagcggtgtgtgtgtgtgcacaagcttaggtgcgtgtttgtgtgtgtgtatgtgtgtgtgcacaagcttaggtgtgtgtgtcggagctgcccaggctcccttctgtgttccactcacagtgcaccgggttgcttctactttctctgtgattattacagttaccctccctccgccccagacccgtgtccctgtcactgtgaaacgcattatctctcctgaaagttttccagttctaatttaagcgtattgattcatcagagccttttaccaggctacctcacatcgtattttaccttcttagtgtcaccatccacccgggccaggctgctgggtgttttccccagaagagcctctggacgcccactgggttatttggttttcctgctgtttcaccgtctatcaaaacccactccatagatcattcattttagactccctgtgagtgacattgataatgcagtgagctcctagaggaattgacatagttctgcagtatttattaggatgtattatttgttcaattatttgtctttcctgccagtttgaacttgagtctggaatcatgtcttattcatctttaaaacaaaagctagttccatgttggcatagcaagcattatttacacaaacatatagacatatttataatgcaatcattccgaagaatctgctataaaaatctcattcccttaaaaatcagaatattaaaaccgaaagggacctttctattttaggtaaatgtgcttaacctgttttgaatatgagcaaccccattttcctaacaaatgtgatggagatgtcgtgtgataggaaatgcatgtatatgcacacacctcatgcattccagtgatgttatatttgacaagcaggactttatatgatgtctttgacagggctcagcatatatgcatttctgcaaagatcactgactcgttggcccgtatgtttgaaataactggtttaggttaggttacttcttttgggggttgttaaacacacacacacacagaggctagccacagctctagggagcatgtaagttggttttgatgtaccaatgctcttttcttcaaatttttttttttaacttttaagaatggattttcttcataaagctccaggtgtagtcatattcttggagtagaaattatctgtgcattcaaacagtgtactcatctatgcaagatgctcattttcatgtgttgtgtcttgttgtgggatattcgtacactgtgtgaaggtatattgctgtaatcagtgtaataaaaagtggaacagccagtagctaggcaggaggtataggtgggacttcctcagagagaaaggaaatagaggacatgaaaggagacagaaagcaaggtgggcagagtgtgtgacagaccgtagatgaatagaaatatattaatttaagttataagaactagttagaaacaagcctaagctacggccaagctttcataaataataaatctctgctggcaacccaaaggaagaaatctaactacagtttatatatatattttttgttttgtttttgagactgggtctctctagatagtcctggctattctagaactcactatgtagatcaggctggcggcctccctagtgctgggattaaaggtgagcaccaccgcactggctacaaacattcttgagctcttaaaatctttctctgaaagacttgaaacacatttttactttgctatttccatgagttagctaatacaatattatctaactactaacattaaaggtacctacctgagcaataacaacttttaaagtaaatttttgacatctgtcatatgtcataccatgtttgtatatcttcaacaatcggataattggtagatttgtttataaaagaagcaagagttacttgaactttagatttttcttaactaaaagctaaaagtaaacttctggcagttgctgttgtgggtaggtggtggtttctcttgaatcaccgacaagatgttctagaccatctgtgagactctgcaaacgcgttagttgtggagtgggtgaaaatgtggctaacgcaggaagcaaaaccctgtttctggaaagcatacctctgttatttgtaggtaataaatatattatgaccagttaagacaagcactgagaaaataggcaggtaaatttgaaaatattcctttttaaattggagtctgttttttaagatgcataacagaatgtgaagaacagtatatctcccacgttacttactagccagaaagggagagaaagagcctttcagaaaggaagtcaaagcaaactcatattataaaatagttttaagtcttttgaggttttgcaaacaggaaatgagtatacagatttacagaagctgtgtcaccgtttatctgaaatgttaataaaattgggtgttgagttgtctgcataattttttgtgtgtagatgggtttttatgcttctaaaatatgaaaatgtagtttactttcttagtctctatgcagcctagagaacacttttaaagtaattctctctcaaggcccaccatatccattgcttaattttaatatatacttaaaatgattgctggatttgtatagttatgtgaaaaaatattcaaaattttggttttttttttattgttcttcctatgcatcttccttggctgacttgaaatgaaaagttttaaaccttttaggagctgcacttgtggagttggggaatttgttctccccacctcaggatgctaagacagtgtttgcataacatgaagcaaacagggccctctggttcagcctggctgtggaggtccggtctcggccaaacctggctgtcactcagctcctgcatttggagtccttgaggacttgtcccattgtctagatggcaagataaggtggtgttcttaggtccatagagctgccactttgaattaaacctgacaacccgagtctgaggtctgagccccacccataaggtgggggcggggagcctattctaagttgtgttacctagcaatttgagttagggttgtgatggacatcatcatcgtttcctttaaatttctttaatgacagtaaacatcttttagggcaagtattaaaagtctttgggccggggctggcaagatggctcagaggttaagagcactgtctgttctaccagaggtcctgagttcaattcccagcaaccacatggtggcttacaaccatctgtaatgagatctggtgcccttttctgtcatgtaggcataacactgtaaacataataaatctgatttaaaaaaaatctttcggccatttttaaaattagacttattcttgctatgagtgattcatcagaagtacaacttggaacatgcttcctcgaggtctagcttgtttcccacactgtcttggctgtctgatagtcctcccccacccccatctggatgaaacctggtttatcagcagttttttatgtttcatgcttttggtatcatgcctaaaaaactttgaccatctccagattacagagattttctttgctcttttttcccccttataataatagcatttttcattttgtattaaaatttgtgctccatttgggaaaagctttctataaaccatagagctttatataaaccaagtaagaactgtgttgggattactttctggcatataggtgttgagttccatttgttgaaaaaatgctgaccttagcaaaaaagaaaaaaaaaatgtacacagatgtgcaggcactcttgatgaccagaagagggcttcagattgaagctcaggttagtgacacttgtgaatgcctgacgagggtcttggtgtctgaagtgccatccttatagctgagcagccagcactgttagccactgggccggtctttctagtgcctgacattctttgacctttgcaccttgctactttgtcttttgactctgtgtagcccaagctggccttgaactcaccccaccacactcagctccctttgcacattttcagaaataaattggttaccttcctgtgggcctatttctgggtctctgttctgtctcagtgtatcacagccatcttgttgctatgctttatgtaaagcaagtcttatatcgtacactttgttatctttgcaagagagttccagtggttctagtttccttgctttctgtaggaattaattataaaatcagcttgtcagcttctagctgcattagactggaaatctcttggctttgttatattgtgtctataaagccttgagcacagtattttctccacacacttagatactatgttttctgttgacgtgtagttcccagcatatagatcctgtatatatttgattatgcccgagaatttcatttatctattatgtctattataatgtatatgtaattataaatgtagctattttaaatagttctaggactattattagacgctcatttcttcttgtgactttttggcattggtgggttttgaggagttaatccatgtaatatacattatgtaatttttgtatatgtaattctgtttccaagttgtcattgctagcttatggaagaacagttggtctcttggatcctttgggcttgtacttgtatcttatggacatgctaaaatcatggattgtaggaactttatgttttacatttttagtctttgaaatttcatagactgtattttgattttattcacccccagctcctcccagatctccccacctcctgcccacccacgtttgtgttctatgtgcagctcacttgactcctgtctccttttaaaacacacagagagaaattgtttttcttctttgggattttcaatgcagcaacatggactacaaactacagttttcttgtatgtatcccagttgacattttcccccctgtccttattgctctggtaattcaacaagattggtatttggagcatccttaccttgttataattttagtgaggaaagtatttagtcttttactaaattcatgagaaattttgctctatggtttattttgtttttctcattccttttatagggtaatgttaagatcttttaaatgctgaattgctttatgaatctaaaagtttttggtttttttcttctctttcctcttattcttatttatgtgtttgtttatttgagatagggtctctctttgtagaccagactggcctgaagctcacgagatccatctgcctctgctctggcgtgctgagattacaggtgtggaccaccatgccctgccccccatataagtgttctaatctccttaaagagactgtatatccctgtttgtctttgttttctgagatagggcctctattgaccggcctgacccctggaccagacactgattttacctgtctcgtgttctgttttgtttaacgtgtgtgtgtgtgtgtgtgtgtgtgtgtgtgtgccccaggtgcatgcctagtgcccatgggttcacaaaatggtgtcatgtgccctgggactagaggtggggatggttgtgagccacccacggtgctcacgatacaggagcagcagtgagtgctgagccctgtctccggctctggtgtattttaagacttgccactgaagctctctcggtctggagccttttgtgcagaatatttttaactccagtttctttactatttaaacttgttagaaaatagctgtagaaatgtggttatgtaactccagtggctataatagttacaggtctattgctggttattcatttcttcttgtaggactttatgtcatttgtgtgttttgaagaactaatcttagttaggtttctgatgctgtgaagagacataagcacggcaatgcttataaaggaagcgtttaattggagtggctcacttgcagcttcaaaggttcagtccattatcgtcatgtcagggagcatgacagcagacgtggtgttggagctgacagtccttagattttgactcagaggcacaggaagttgactgattgtcacactgagaggaacttgagcaagagacctcaaagcccgccccacagtgacacactcctccaacaaggccacacctcctaatgtgcctctacctttgggggccattttctttgaaaccaccacagatgtgtttaatctaaattatctaattcatgtatatgagatgttagagtgaagtatggctctgcagtggtttctcttggtctttaagggcgtgggagttgagacagattgtgtgacccagggtggactccttcttttgatgccctgccgcagcacagactcttgggtactgggattgcaattatgggccatcaccactggctcttcatttgttctctctccttggttattcagtctctcttggtatctgtctctaccccccataaacactcacacaccctctttgctttaaagaacggacctttagttttactgtgtttactttctttgcttctatttacttggggtttattctgctcttttcctactttctctaggttaggacttggacaattgatttcagatcttagattctaacacaaacaagatttctctttagttctttttcagggtcttcgctgtgtgctccataattctaacatcactcaactttgtattttcttagatccattgggctgtttgctcttagtttttatgtacatgtgtgtgtctgtctgtgtgggtgtgcacacatgcattggagtgtctgcctaccagctgtgaactaaactacagtcctctgcaagaacagcaaacttaaccactaaaccgtctcgcagtcccaaactgagctttttaaatttttatttgtttattatttgagacagggtctcactgtgtagtctggctgccctgtaactcactgtgtagaccaggcaggccttgaactcacagagatccacccagcttttctgaattctatatctggcatttcttcccccccacccccctgttacagggagggacccttgttttttcagttttctgttatgctttggagatcagcacagcctgtcagtcggcctccactgagaccacggttgggtgtcaggttatgcttctcaacagctgtgctctcggggatgctggaactcttgttcgccccatcttgcagtggggaggcttgccctctgtcctgtggcaccatgcagcagatgcccagttgttgtgtcaatgctgctgcactgctgccccagcctgggctcctcaaggctccctctctcttgctgctgttaagcattgcccttgacgactcctgcagaatgcagctgagcacctcctgcttctcttccacattcagccacctcagcatccccttcagtgcctctttcaagcccattgaaagttgcctgtagtggccaataatattctttgtggaaactgcaggaattgagatgatggtgccactttacataagacgccatagctcatcccggaggaggctcagacttggacagagcagggagaattcttacagtcagatttgcatttaagcccatagtatcccaacagccagaacacgatatttgtaaatgcctttctctctaaatcatggacaatgttaggggaagcttaagaagggcatctgtgataatgtggagctaaggtgactttaagccctggtcttaacttatttactgttactcctttagaaatgagctgcacgattgagaaggcacttgctgacgccaaagcccttgtggagaggctgagggaccatgatgatgcagcagagtctctcatcgagcagaccacggccctcagcaagcgagtggaagcgatgaagcaggtttgactcttcttgctggcttcaccgacatttgagtaaacttaagtcatgaatgtcttagtcagtgttccatcgctgtgaagagacaccctgaccacggcagctcttataaaagaaagcatttagttggggctggcttacagttttcatcacggctgagagcatgtcaacacagagctagagaagtaactgagagttctacattcagatccactggcaacaggaagaaagaggctttgggctgggaatgaaaccgcaaagcccacgcccagtgacacatttcccccaataaagccacacctcctaatcctctcaaataatgtcacttcctggtgaccaagtgttcaaatctgtgagcatcccaacagccagaacacgatatttgtaaatgcctttctctaaataatggacaatcttaggggaagcttaagaagggcatctgatgatgtggagcggatgggagccattctcattcaaaccacagtaaacaatcagataatttctaattgcagtcttcacatagcatcacttgtgtgtttgcttcactgtggactagggtatattaatcgtgttcactaacaagtacataggtttattttaaaatctatgaatttcatccctcttctgacagaattgcatatttgagttaaataagtgaaactgttaaatctaaatacatttgataaggatcagacaacacgtttcactagtactggcacacattagatatttgctgtattatataatgttgagatgtttatactttcctttataaaagtacttgggtgttactttgttttttgtttgtttgtttggttggttttggttttttgagacagtttctttgtagctttggaggctgtcctggaactctctgtagaccaagctggccttgaactcacagagatccgcctgcctctgcttcttgagtgctgttcaaaggcgtgcaccaccaacgcccagcaaccaaataagtttttttaaatgatgtaaagaagtatctaattttcatcctgtgcggttatttcaagttcttttttttgctagcatgttttaaatttgtcatttacaataggaattaagtaggttttacttcttgctactggcatgtagaggaaactcccagtagatgattgagttcagctactgtataagctgtccccccagaaagacttccaactcttaaggaagcagccctaggcaggcagtggtggcagacaactttattcccagcacttgggaggcagacacaagtccgagttcaaggccaacataggctacacagagaaaccctgtctcaagagggtagggggagaacctgaactaaggctccttaaaagttaccagaaatactggagcaagtccacttactctgttttatacctgcatctccctaaagtggtctgctccttgaccatccgtccagatgacagtaagcataaacctggtagtgatgtgttttacaatcggactttgacacctgcagttaagaaccaggagtgttactgtaaatatattcccagctatccagtaagaatgcctccagaaaaaagaataattctaaaattaagattcctgctttttttaaaaaaaattcaaaatccagccagctgttgtggtgcacacctttaatcccagcacttggtaggcagaagtaggtggatctctgtgagtttgaggccagcctggtctacatattgagttacagaacagccagagctacataatagactttatctcaaacctacccccaccgccccttgcagtgctagggatggaacctggggccttgctcatgctaagcaaattctatgccggtcaggtcagtgtgtttctggcttcccaccctctctactcccactgacctctctcccagtggatttgcctgttcgagacctgtagacactttgtgtgcgtaggacatgagctgtgtggcttttgtgattggcctattgacatgttttaaatttcatctggtttctcgtatgtgtcagtctttaggggatacagcatgtcttgtttcttctctcttgggtcagggtgtgggtactctaattcctctttttttcctattatgagtattggtactacggatgttttcttttccctaaggaaggaatgttgggtcatgtaatgcctctgtttcactcttaaagggtctgttcatttatatccatatagcaggtaaaaatttgcaaatattgacttcctatgtgttctttttttttttttttttaatcttctcattagtatcaggaagaaatccaagaactcaatgaagtggcaagacaccggccgaggtccacgctagttatgggaatccagcaagaaaacagacagatcagagaattgcaacaggagaacaaaggcaagatagattgtcgtgaaaaagacctttagtcttccattgtggtactagtttgggactaataagtatattcacaaatcggagaggggctggagagatggctcagtggttaagagcactgttgcagaggatccaggttcagtacccagcacccacgtcaggcagtcctggctgcccatcattccttctccagaggatctgacacccccttctggggcgcaggcatgtatgtggtgcacagacaatgtaggtactcacacatgcacgtgaaatcaaatagaatcctcttttaagtggggaaatagtgagctgaagtcctcctttctatttaatctccttctttggtctgtgtgacgaggaggcgctctctctgtgctctgccctgcttatcctcttctcagctgcttctcacatctggtttacaccattttgttacctgtgaagaactgaactccactccctgccgtgtcccagtgtggctgctcatatgctctgctgtacctggagactttcactgtcagctttctctccatccttcaacacaagcccaagtccaaactccccagaataaatgtggccatgatgcccttgcttaaaatcttctgttttgattttatttccttgtcagttgctggtctctcttctgcccacttcacacagctctcctccacactgtttgttttgcctttctacctcagtctcctaacatagccttcactttcatgctccttgctgaagattctcgttcctttagctagcgttcaccataagagctcaagttcattgcagtgtgataattctgtggaactttccccagtccagcctcatagctctgaaatgatttttaagaaacagttttaaatgaacactttaaaaagctaatgagagatgtctccaaggattaagggcacttgccaccaagcctgtcagcctgtgttccatccttggaacccgatggaacccctggaggaagacaaaagtcaattgcaaattgtcctctgacctctgcatgtgccatggcgtgtgtgtgtacacacaacacacacatacacacacatacccacacacatatacacacatgcacacacacacagcataaacctttatttcaataaaaagtggtgaggggcttctttgctgcacggtctcttttaagatgtcatgtatgtcagtgttttggtaaatatgatttgggagagtataatcttagctcatttcaataaagcacattgttctcgatagaactgcgaacatccttggaagagcaccagtctgccttggaactgataatgagcaagtaccgagagcagatgttcagattgctaatggccagcaaaaaagacgacccaggtataataatgaagttaaaagagcaacactcaaaggtaatcaatccagtctacgaatttgacttgaaatgaaaattggggccattggttaatcgatgtttagagtttaaacaatgaaaaaaaaatctaaaattggtgtgatatgatatataattacatccccttctcccccccccctttttttttttttgggtttccctgtgtagccctggctgctgtcctggaactcaactctgtagaccaggctagccttgaactcttgatctttctgcctctgcctcctgagtgctggaactaaaggcatgtgtcaccatagccagaaatacctcacatttttaattgacattttctttcatcgtcaccaccctgccccctatttcttgttacatattgtattctccttggcttattcttgtaactcacattactccttattaacagggtctcactgtgtagctctggctatccaggaactcactgtgtagaccaggctagcctcaaattcagagatccatctgtgtctgcctccctattggtgtccttagtaactttaaaatggtgtgtctgtgtgtgtggtgtctgtgtatgtgcagtaataaactattgtaaaaataaaggtgtgtttagtttaaaattactctgtgagattctctgcttttaagtagaattttccagtgaatctgtagtgctacctgtaacacaagcagaaaatggaaactttaaaagtctgtgcactgctgagtgccgattgtttccctgaagagtccagtcttcatgagaagccatggggttggggatccttcatgtagatgacatcatttgagaagcaaagccgaagtagttagagcacttttgcagttgcttgaattgcggccatttgggggcagttgtcaagacaagcaaaatagttgttgctgtttacattaaactgaattttaactgccagtggaaaatgaaaatattaaactagattggatgactggctttggataatggtgaaataaactacttacaactaatactatttaagaaatagtggtagttataagatacatatatttctcagttatattttggaatctttaaaatatttcttccacattggcgtttatatctaattatcctgtcagaattagataactagtagtattctttgggtgacagttatacatattacggactgtaatagcaacctcatgttgattactaagagaataaaggagtaaagttgggtttagtgttacctatttataataatcatgccctaacaaaatggaaacccttgggtatttaactggtcttttgaacataaagtctatggttaatgttagtattggttacagagtagctacttcagtgtatatcaagccatgtacagtgacacatacctctttaatcccaatacctgagaggtaaagggaggaaggtcggggttctaggccagcctggtgacatgaaattctgttttaattctaccttccctctcctaaaaataagtaaatgtgtaactaagagagttttttttttttaagtataagaattgaaattccagaaggccctcttgttttacaatttgaaaaaccaaatttttgaagttttgaaagagtgaataccaccaccaccaccccaaaaaagtgcgtagagtaaaatcttgttagtcccatatagtagtaactgtggcagagcgaatgttttctaaagcacatgaggaggtggaggcagagctccatggtagagcatgtgctgagcatacctgcagccctgggttcaaccccataaacaaacctattgggtgtccagtcatcagtgctgtcctgttaaaagtttaaacacttcctaaatagccataaaccttccgttaacatttgttgtgtagattgagatgatccaagtgctgatccttgccttccataaagtgactgttcagttatttgctattaattctaactaatacatgttaatgtttgtggttttgatttttcccaaaaaggagacactttgactaagtaaatcaaacatttattagttattggattagttgctagaggcaagagcaaggttaatgaaggaatacatcacatcactgttaagtctgccatgtaatgggaagtacaaaaacaagcataactagaacataaggtagagtgaggtaaaaatgagtcattactatagaagtaggaagagcagtattggtttccataagcagagtctgaaagaaggcagattatttaatctagccttgaatcaactacaggagtggggtatgcaaaacagagaaatgagataaaggcacagaagtgcaggactagacttggttaggctccagtgatctgatatgcctagacatagaaatacctctgccactctttgggggacacagttccatgtggctgcactttgcagcatgtgtcctgcttgaggacatagtgatacagaatttttcacttatctagagccttatgagtccatatttaaaaatcactagaaaatttaactcagtttcatccaaatacttatttttacatcattattttaacagacgcctttttggaaatcttaaaaaaacaaacattccaacggttggctaacacgcatgaactaacactcattcggtgtttaagttacggaagaattccgtattaacattataatggctctgtgctacagattgacatggtgcatcgtagcagccgcgaaggagtcttccttgatgcatctcggcgcattcttgaagcacctcagcatggactggagaggcggcacttggaagccaatcagaatgtacactaaaccacacagtcaactttggtgggggggatgagatggggtccacttaaagagttgttttatttctaattgcccttccagattagatcagcaaataaatgaaatcagttgaagaacagtgtgcttttcatggctgtgctgctgagtctaaaactctcaagtttgtcctcagggccctgtgtgtcatgcacaggatgtaagccattatagatgacctgacaggtttagagatgtttaccaaccaccttttttttagtttgttcttactagatgttgcagcagtttttgttgttataaaagagtgcatttctagacgttagatattttcttactcagaaggcagaggcagggagttctctgagtctgaaacctggtgtgtctatgtcatgagttccaggctaattagagctatgcagtgagaccctgtctaaaaaaagtaaaatacattttcttgatattaactttagtctgatattataaaaggctggtccatcaaacttaaaatttttaatttagattcttaatttgtagtcctttggtttgagttcacaaataggaatgctttcttattgtgtcttaagtgttgaaaagctgggttgttgctgcagagtaatagtaatagtaataacaaatactatttacctgttaatacattattaataatcattaattattattgataagtaagtaaataagacagacttggatgcggttagcaggacagtccatggtgatgtactgacatttggtcttcagagccaccgttccgtaagagcagtgtgattggttcttacagctagtaagtaatcgtccactggtcctgtaaagcatgctaagcatcattttgttttttcctggtgacaaacagactctatactgaaaaatcagcagcctcttttttctgccattttaaaggcaagaaattattggcttcctatatgccttttaaacctgtgctggtgtctcagtactgaccaggttacagattaagaaagctgttgttattcacacttttactgtaggccttcagtttctcagttatctgatgtgtgtcctctgtaacagggggtcttagtgacttcgaggtgctgcagagaatgacaggcgtttgccttggtaacagctttgctaccactaatccaaagctgtccaatacacttcctaaactagtgacatctgtgtgtcatgtggaaggtacttagccacatgtcaccattaagcactaaaaagtgtcactcatacatgtgagagacagaatcactaattttttttaacatagtttctttttcaactatactgcatgaggcagagcaaatgttctttatggtgtcttctaaagatttctccattaagacaaagggttagaggtgtagccctggattcagtccccagaaccaaaaacatataaggacctacatctttttctttaaggttattaaatgggactaggggtgtagctcagcgatgggatgtttgcctagtctaaactcttggaaacacatagacacatattaaatacagttagcaagggcagtgctgttgtcccccatgtcctccagtttaatagtcatggggttctctaaggtctgaatcagatccttcctacagctattcagctgcctgaaagacatgtgttcatttagggattttgtcattggatttcaaatgtttttgtcttaatgtattaagttgtgttgccaatgaagagtgatcaatagaaactatgagaagacgatgatgcttgggcctgtgttggtcggctcttaggcccctttgtctccctcactgagcagagcttgtgaggtcagggaagataacttcagaggaattgtgcttctgttgtctggcttagtgcctgacacatgtcatcaaggaatgatatagaatttgtaaaactgataaacatgggtgtctatagcatgtagaaattagttctattttcatcaaaaaaaattcatgttttaatactgcaaagcaattagttcattttgccgaataacttttattccacaaacaatacactttctgttctcgaggaggattatgtctagaaagtctcttggtagacttgggaccggcttataggcattaatactctagaggagacttcaggaagaaaaatcaccgcatgtgccggcaggttttcatctttcccattgctttaaccatagtgctcgcagccatgagaaagaaaatcttcttggtcattgtgatacctgtgaaatgaataagtattttgctatagagttgagttatgttgtgatctgtatccttaattatattttctgtcagtttgggggggaaggggattctctcaatgtagtcccagctcttctggaactccctatgtagaccaggctggcctcaaactcagagagatcctcctgcccctttaactctattcttagcacctgatgtccacccagctttgttatgattcctgttacaaagcaacataaggataccacacttttgtgtggcagtgtggttctgtcaaaagcgatttcaaaattaaacgagtaaagtctttttcacatttccgtgtctaccgtttcttccaggagttgcaagcccatgctgaccagatcaccgagatggcagcagtgatgagaaaagctattgaaattgatgaacagcagggttgcaaggaacaggagcgaatatttcaacttgaagtgagttttaaacttcaaatacagggtggtggagggcggggtgctgtatatccctgcaaccactcaaccagagaacattcctagtctttaacatacccacactctttgagttggtggtaatgattcctgaatctgaatgctagtgtgaaatactccattgggtagtaaggcaagaatctgggagcatcagtgacacatgaatccatcagtagttgagaaagtttgtttttaaaacaggtttggtggcacacacctttaatcccaacactcaggaggcagaggcaggcagatctctgaatttgaggccagcctggtctccagagtaagttcccagacagccagggctacccagggaaacctgtcttgaaaagaaaagagaaattttagttttgattctgtgttgttttttcgtgtgtgcgtgcatgcgtgtgaattttctggtttcataatctttaagatgcggttctttggtagagatcatggtgatgcagaatgtttttatgatgcacagacagtgctgtttctttcatcctatcactgcattgggaggcagcggcaggaggatcagggatttaagatcacctcaggctccaatgagttttaggccatcccagactacatgaggtcctgtctcagaaagagggctggacccgtgggtaacggttactgactctggatccccagctcctgtgtaaaagccagacacatggatgtccaaacagtaagttcagtaagaccctatctcaaaacatgaagtggagtgcaagaaagcaggactcctggtgtcagcgttttgcctcctcgtgtacacacagggaacacatagcaccccaaaaaataaaatttaaaatgctttgcttaaaatcatgatcagaaaatttcttacggatggccataaaacctatttctgtctctgagcatacagtatgctcccatttgtaaaataagggtaggtcaactttttcgacaaaggaccagaaagttaagtcctttgattttgcaaactgaacagctgatactcagtgtcattgtggttatgtcaaagcagccacaaacaaaaacagatgggcaggactgtgttgagaaaccaaccccaggccaggacattgagacctagaaagtgaggccaaagacagctgtagagaatgggttggcaaaattgcttacataatatcagataatcatttacatttctttttgaaaaataatacctcagctagttttgctgatctcacattttgctaagggaaaaatacagtaactaccactgagtgatgaaatctatctcaaggtattattcatgtagatttataactagtattagtttatatgggtgttactcatctccagtctgtttgcaaaacaagctaatttctgcctctttacctgttctgtctgcacatattaagacttgcagctctgtggaggttgagtactgactctatgtctttaacagcatttgaaatctggtttttgtttttgagagtctcactgtgtaaccctggctggcctaaaacttactatgtttaccaggatatagagatccccttgcctctgcctcccaactgatgagattaaaggtgggtgtcaccacacccagctttgaaatctgttttgattcaggttaacagcctgtagcacacagtgcatttatccatttatgtgatcacagagcctgcttttcatgctacgccttcatacgtctggcctttaaaatacgttcctcttagaggtgccgtgtacaaatcttcctgtctctgcacaaaggtgctctccctttgcgttgggtgtaagccatctgcagttttacttgtctccttacagcaagaaaacaaaggcttgagagagattcttcagataactcgagagtcctttctgaacctacgaaaggatgatgcatcagagagtacatctttgtctgcattagtgaccaacagtgacctgagtctgaggaagagctgagtggctttctgcgtgggcccatccaagtgagtggatgaatgaacataaaacccaacttcagtcagccttttttcctctatagtttgcacaagtacactggcaaagagaacagaagaatgtatcatcaatggtcacactcgatcccagcgagtaaaagacagagaagctgagccgctgggtgaatcgtgagcaagcaccctcaaggtgctgctgaagggctgttggctccctggatgacacatgggtcaccctgaacaccccaataaacatttggaaatcctaaactatcccagctttaaatgttaagttttgctgtggttttctgaatggaagactttgttctaggtcttacctttcctgttgagtgtcagaacagcttatgtatgaggcttcccatttgttcagtctctgtcagacagttagactttaaaggctttaagaatgtgttacttgcaccataaacagaaggcatatactcatactatacctagttcccatgacttgtagatagccgttatccatgacttgcttgagtgtgtgcagtaccatctcaggaaggaaagagaaggaatactactttctaagaaagactgccatatatagacacatttagtaggttaaactactttgacagaaaatgttttggttctgggttaacagtgaaactgccctcctctctacttgctgcttaaggataggagacagttcactagtggacagttgacatagttaatgtaacaagatgggtatggtcctctccaagtaaatctggaattcctttgtttttatttaagaaattactcttcaaatccttaaaaagtagattcatgttccaaaaacaaagttctggatccgagtctatgttccatttgtctcttgnnnnnnnnnnnnnnnnnnnnnnnnnnnnnnnnnnnnnnnnnnnnnnnnnnnnnnnnnnnnnnnnncaatgagtgagggcccacagacattttcctttgtatttaaaaacatttacacccggccagtggtggcgcatgcctttaatcccagcactcgggaggcagacgctggaggatctctgtgagttcaaggccagcctggtctacagagcaaattccagggcagccaaagctgttatccaaaaaaaccctgtctcaaaaaaaaaaagaaaacacaaaaatatcatatttacagtctgaaaagcttttgaaggccacaagatacagaagtgtgctttaacaccaattgaaacctacattgttcttactatgtagtgatcagaataaagggataaaagattgtgaaatgattaaaaatatacttgtgtgtcgagtgcatattaaaattagcacaaatagaaagttctacttttgagtatatcatttgttaaatattgctttgctttgtaatttgacatgcagtttcatgtattggcaaaattcaaaggacttttcacttgagaaattttcagtctgaagtttgaggtgagtggggtcccagggctgttaggaaagggccagtgccctagatgttagacagttcacattcggaggccttaattttttatacataagtgaatttatttttaagattttcctattggtttttggagagtactccttaatttaatggtacatttgttcatgtagttttatcccaggccggaattttaaaaaggaaggctgcactgttgagacaagtcagagacaatgcattgagcagctctattgtaaaatgttatttgagaagtgattatttttgtaaaaaagtatttatcctttgtcttgagtataattttaagtttgtaagtactgaaatacatttgctttgtttttagcaagttttccacccatccccacccccacccctcgccattacccccaaaaaaacaacttaaagcttacatctcagagtgtgtgttgaagaggagccctattttatcaataaagatgagtgtttaaagctggggtggcctcagggttaatttcaaaacaaagcttgcatttcttaaatacaatttgtttttgaagctgcttctctttgcaggaggggagggtgacactgtgtgtactgtgtatgccctttgtgtacaccgtgtatgtgccctgtgtgcactgtgtgtgtgtactgtgtgcgcgctctgtgtgtaccgtgtatgccctctgtgtgcactgtatgtgctctgccactaagctgtatgctcagccctatggcatgttctttggtgtgtgtgtggggggactattaaggagggagggggagaaagggagaaggggatagcatcttgcaatctcatcccttgcaaatttccatttcagcaaaataaaccagctagcccactttttcaaacagccgaagccctcagcaagtaccagcagttaaccctgtcctcaggatagaattactaatcctgacacacaggccattcttttcaaggagcatgagcaggaagactgcatggaggacttttggagtacaagcaggaaagctagcagcctggggtctcagctcccctacagagtgtggcctcagacttagcactttcttctgtgatgcctttaaagtagaggtatcctgtctgttcctgctctcaaattacagcaggactctggtcatagcccagtgctatcccaccagcttctcaaataccagcttgctctagaggggtttatgttaacacctattgtcaagacaaaatgaagtgctaatccccatatagtcaggctgtgagcatcgggagcctgaccaccatgattagcctgccttaggccaagctagtctcaaacaacttggttatcctcagctacatagcaagcttaaggccagagtgggccacatgaaaccatatctcaaaaattaaatacatttagggactgaagagatgattcagcagttaagagcactggctgctcttctagaagacccaggttcaattcccagtacccacatgacagctcacaactgtctataactccagttgcaggctccaacaccctcacacagacatgcatgcaggcaaaacactaatgtacatatatatgtaaactatatcaccctggatttccttcacttcctgttagccttaagctgagattttaaaacaactgtattttccagattgaataatattgtttgtaaaagcacaaacaggaccagtataaacttctcgagacatcacaataaggaggccttaagcatttttcaaaatgggtgtttattacaaagattacacaaatggaattattaaaagttattatgaaaatttaaaaacaattagtcttttccctccaagaaagcatattctgcctttcacagctctgactggcagagtgttctaacaggacagagaattgctcttcaacattccacgaaactaaaatacaggcatgtgacagaagccggagtccctatagttaatttttgttttcaaacaacttcattgctaagccagacagtaataacagtaagaattttttgaaacaaaaggtttcatttggttcattttataaatttttcattgttttctcttcaaaacattttaaaaaccaaaactgaagactcctcccattacctgaaatttcagtagctgactattaaaaaacaccatcaaggaagcagcggtaatgagcacaccacagccacagcgtaattccactgacagcagcactgcatcagggaatccagctcacaactcacaaccctggaggcgtgcagcccagggcacctggcactttcttgtgaaaagggggagttaaagtgagaggcccaccttacagaacccagggcagccctcaggagcagctccattccagctgattccctctgagctccagagctcagtagcagtcactgggaacaactccacagggcactaacacagctgcttcacacagcacagagtacaaaggtttcatgtccttagtgacctgtcctgacaaaatagtccactcatcaactaatgcaactcaaaagaaaggtcacaggtcaccatttgggctatgacttatctattatctttaataaacagctattttcaattacagaaataatttatttaaattaccactttaaccctaagaggcaaaacaatagggaatttatgttaattaattttaggatagttggccatagtttttaaaataaattttttaaatattgaaagaaatgaagggttctgtttaaaatatgagatgcagccaagtaatcaaactgctttaatgaaaagcaggagttactttccccttaatcataacattcaagggcaaagaatcaaacctatacacacaaagcaggtacccactgccagcctccccctccacaggttcagactgagtcaaaactgtccaaggacatgtaaaaaaaaaaaaaaaaaaataccagggctttaaggagaactgacacttttattttctggcatattttataaaacacgaattgtatttgtaaacaaaggaaacttgtaaagattgtggaaaatgagccaaagcatctacaaccagccatctggggatttttctcaccgtcacctcggatgctctaactccactactgtactgcgggacctcagcagagacatcaccccatcactggccgcagctgatcccacactgaccaagctctcagccttctacagcagcaggggtgtgcgctctccagctggctgttccttctgaaagagctctctgatctgagtcaatcggccatacagccgctctctcaggggagggatatggtggctggggtccagaatgtttgtcactcttctttctctctcttgcttccacagcttgtagggatggggagggaaaggcgcctgtcctctttctcttcgaatttgcagcgtaattccactgacagccaacatcccccacacggccaggacaaggaagtctgagggaaagaagtacttgtgtactcatgggtttggtgttgtggcttgttttatttttgagacaaagtctcaatctatatctcagactatacttaaactttggcaatccctggataccaagattatagacatgagccaccaagtccagatattgtttttaattgtacttgaaataaaaaaaattgtagccaggtagtggtggtgcacgccttttaatcctagcactctggaggcagaggcaggcagatctctgtgagtttgaggccagcctggtctacagagtgaattccaagacagccagggctacacagagaaaccctgtctcaagaaaacaaacaaacaaatggtgtatgtatgctatgcgcagattcatgtgtgttcaagcctaagtgggtggcaggtgtctttctctgttgctcgacaccttattgtttggacagcctctcccattaaacgtgatctggctgagcaagccccaccatgcacagccatgcttggctttttatgtgggtttatgactgtttatgacttgtgtctttgaacgtttctgtaactgtgtagcgcatcacttgttttctttgaaagcttaccaaaggtcactgtgtgttggggttcacccctgtcatctttgttaggctagagacaggagaatcactgtgagcttgaggctagcctcggctacagagtgagaccctgtctcaaagacaagatagaaaatcagtaatggacaaaatcttgtgactaaggcaacaacatgatcactaactgaaaataaactgaatcttcattaaagtaaggaaacaaaggagtacattttgaattaaactagggtaccaatctcattccttatctgcccctccccaagggggcggcttcctgatctgagaatggacaggtgagtccatagagtccacttagatgtttgaaggagacgggaacccttcactcatgcagcactctgacagcagcttccggcccctggcgatgcctgcgagctcctggcaggcaggctagtgggcacgcccacttgcacatcactctgatttctggagtcttacctttagtctggaaaggcactccaatgaaagccgctcggaagtctgtgttgagtgctctcctgaggacattcagagtcatgtaggagaggctggagaagatgtaactgtcaatagccagcaccacagagtaggaacccacagctccacacgccaggatgttcagctgtgggagagcagaggagacaggcatcacccacacagcaggaccagccccagctctcaccactgcctgatgtgacagaaaaatcagaggacagtccaccccaggccaccagaaacagtttgcaatcccaaccctcgggggttgagatgggttcagtgtcccctccacactggtgtggtgtccatgtgtgtatggggtgtgtgtcccctccacactggtgtgtttctctgtgtgtgtgtatggggtgtgtgtcccctccacacgtgtgtgtgggggggaggggtgtcccctccacactggtgtgtgtgtatgggttgtgtgtcccctccacactggtgtgtgtgtgtgtgtgtgtgtgtgtgtgtgtgtgtgtatggggtgtgtgtcccctccacacatgtgtgtgtgtatggggtgtgtgtgtgtgtgtgtgtgtgtatggggtgtgtgtcccctccacactggtgttgtgtctgtgtgtgtgtgtatggggtgtgtatctcctccacactggtgtggtgtctgtgtgtgtgtgtgtgtatatggggtgtgtgtcccttccacactggtgtggtgtctgtgtgtgtgtatggggtgtgtgtcccttccatactggtgtggtgtctctgtgtgtgtatggggttgccccctccacactggtgtgtgtacacagtgtgtgtgtaagcgctttccttctcaataaaacttgctaagcatgtgacttctttcctgtcttttaattcttaaatgggtagagaaagcaaacctgacttgagacccccaggtagcaatcctgaagaaaaacaaggataaacacaggtgacaatcacagaacttcctgagcccagataaccacagagccctcccctccctagtgaatagaattcatgaaggattcaatgggtgactctggaaggctggaagggtgtaactggggacccagctgaactgcaacactcactattcttaggcagcccatgaagatgactgggacgagcagagtgatgcaagagaaggtcacccagaacactccatcgtctcgaaacacatttagatttcctggaacagcagagaaataagaataaacaagatgtccatcaagttaaatttctccgtcttggtgtctgtccacaaacacaaggcttaagtgacagccagggaatgagctggcatctggctcactcggttttctttaacggtcagcataaatcacacacacacaatttgtagacagggtttctctgtagcactagctgtcctggaactcagatctgcctcctgcctctgcctccccagtgcagggattaaaggagtgtgctgccttacctaactgacacaatctgtttttaaggctgtgctctagaaggtgtgaggggacctagaggatgacctgaagaggctgacatagaccctgccctcctactcctcagcgctatggttctgattcctacccacaaagtgcgatgactagataatactggtgtgtgtgggggggggggggtcctagtctcccctccagctccaagctttcatcaccttctgtaagggggacccacagacaacagtcaaagttaagcagtggactcatcatgaattgatttgaatcactaacctaattcctgctcatgaagaactaactcctggatggactggagccggccactaacgtgcttcacgcactctgctgttacagtctagtgggcaacacaccttgggggacctacagctacatgaggtcctctcttacaaactaggttttaaaaaaatgtgcatgtaagccgagcgttggtggcgcacgcctttaatcccagcactcgggaggcagaggcaggcggatctctgtgagttcgaggccagcctggtctctagagcgagtgccgggataggctccaaagccacacagagaaaccctgtcttgaaaaactaaacaacaacaaaaaaaatgtgcatgtggtgacagacaccggtactgccagatcctcgggaggccgaggtgggtgtgtctgtgcactcaagaggcagaggcaggagactctctggagtcaagatggtctagtgtgccagtgtggttggtctacacagagttccaagctagtcaaactacacagtgcaatcctgtcctcaaagggaaaaacgtaagtaattgaaaaatgtgggaatgtgggtcctccagccccaatcagacttttgtagctgatgcaacttcaacctagaaggaaccagcctcggtgagcccgagacctgtctgaggaacacttgggggatggagacggccaagggagagagagtaaagagaacactggacacagtactaggttccaagcccactgcccatcagagcaggaccctgttcatctgtgagacacactggccatctccttatgactcaagttagactccaagggcttaaactgatctaaagtaactggctgtaccgtggctcacacctgtaacctcaggaatcaggaagcagaaacaaaggatggctgtgagttgaagccagcctggactgcaaaggaagaccttgttccaaaatttaaagtaaaatttaaaaacaaaatctctgttctgccctatgcgccctgttacccaccttacctgtaacagaagctaggaggtgtggcacgcacctttaatcccagtactcaggaggcaaaggcaggtggatatgaatttgagtgaggccattctagtctataaaagcaagttctaggacagccagggctacataaagaaaccctgtctttgaaacaaaacaaaaaactactggggctggcaagatggttcaatggtaggatacctgacatcaagtctgattatctgagttcaagccttgggacatacataggtatacacacaccacacacacgtgcgcacacgcacacacacacagacacacacaccagcatgaaagccagcatctcctacccagaggagtgaagaatgtcccagaagagacgaggaagcccagcacgagtccaacacacagcatacagagcatgagggtcccaaatcgccaccaggaggccaccaggaggatgccaccgatgctgccagctacagcggtgaggaccaggcggactgcacaagggagaaggcacaggaagacggatcagcatgtgccaacctcaacttcagcctgcatgtccttcaaggcactgtcctccagggctggggacaggccagctttgtcagtaagagagcaaggggtcagtcaaccaatcttaaatgtgattcggggagggtatggagggtgaggagtccagaggggaggggcccggagggggaggctgaggatgtgtttccctggatgggttccatccccagcactgcattaatctggaaggatcacaaactcaagtcatcgtctgcttgctacacagtgagttctaggccagcttgagttaatcagacgctgtctcaagaaataaatgaaggtggggagaagagtgtttgagctattttccccccagtggggagtgtgagctattctggggcattcattgccttactctgtagcccaggctgaccttaaactcaagctgaccctctgtctctgcctcatacatactggagtaacaggtataccaccacacacagatttatctgtttctgtggcactgggatctaaccagttagacaaaagctttgatgctgagccactcccagctggtgccttgtgttttgtttttgtttgatttttgtttctttgtttttatttattctgagacaaggtttctctgtgtagccctggctgccctggaacttgctctgtagaccaggctggccttgaactcagagatctttctgcctctgcctcccaagtgctggaattaaaggcgtgtgacaccaccaccccagtttttgttttttgactcaaggtttcactatgtaggactgctctcagacatttaatcctcctgcctcagcttcctgggcattggtattacagctgtgtgccctggccttacctcctggctgcacacggaaaagtaagcccagatgcggctgcacccagatgcggcagcggcgcagggccccgggcacaggttggccgtcatctcatactcggtgcacatggcacccagcacaggttacacagcggacggcgtggtaggtgtgagcccagcagctcccccgtatacccagataaacgctgtactcaccatcgtacttcagggacgtcagtctggagatcaggatgtaaaagaagaaccccaggaaaatgaagccaacgaagaataattctaggaggaaaccatcaggagacaggaaacaaacaaaaacccacgtcaggtgtctccacaacacaatggaggcatctaaggtccaagtctgtgcccaagcgtccagactcatacgccacagctattcccagagcaagcacaatctggaaggcgggacctcagcagaagtcagagaaatgtttcgctattaaacggagagcgaacctacaaggctacagcatcagatgctggctgcacttgcctctcacacagttcagtggttacttgctaatttcatggttcatttactacgtttctctcttctttgagaaaagggctccttcatgtagcccaggctagccctcagactagcaggctaacagaatgagtgagggtctttgtgggaaaaagtacctgttttccagaatctgtgtccaaagaaacaaatgaagatcccaagcacagcaaacacagtggagaacactttggtagatactcttccttaaaaacacataaataaataattaaaattagtgggcagctgcatcttcattactctataggcgaagcacggggtaaaggaaggtgagctggcttgagaatcatttactctgcacaagatcactgctcttaaaaatgcccttgttcccctgatgagttaatctacgcaggcgaggtcactcccagtggttgctttctgtaacaaggagaaccaggcaacgcatgctccccacacccatggtgtttctttaggagggtgtggcagaacatgtgtctaaaacatgcctgtatcttcaacaaataaaactgcagggagaaaagtggggtgactcagaaaattcataagacacgagaactaaacacagatctcatctacaacctggctcatcccactggggtgatgcctgcctgtctccccagcccggggaggctgagacaggaggatcactgcatattcacggctaactgctacacagtcagttccaagacaaccctcgagaaagagtgaggcctgtctcaaaaaataaataaataagtaaataaataaataaataaataaaataaaagaacagtaggggctggagagaactcagggggttagcgcaattgtcaattcccagcacctacagggtggctcacaaccagctgtgactccagctccacaggatccagtgccttcttctggcactacactcagagtgcacaggccacgtgcaagcaaagcctccacatacataaaataaaagtaaataaatcactctattgttttaaaaaagatagcccttatcaagagaaaacactgcccaccagattcaccttccttggaaacccttcaaaatgagcataaggaaataatccttgaagaaaagcagattcaaaacgcccacacacactgaaagacttacaagctggccacaaattcaaatgcatcagttgcttaacagcgtccagtggggagagcatgaggcacacatttaagcaacaaatgagcggtgtaagaccagagtctgaatcatggtagacacacagatccgccctgagaacaagactgccggatgattgaatgaaagacaaaagtgcatattccgtcaccgaaatcacggagctggcccagtgttctgccttgattttcttcacattaaaaacgtgggggctgggaaaacagcttagttggtaaatgccttccaagccctaggacgtgagctcagatcctcagccacataaaaagttgggtgtggcagtgactgactccaagtgagggttcctggggcgtgctggccagccagtccagccaaacaagagagctccaggtacagtgagagactgtctcaacagatgatgttgagagtggcgtaggaagacatccaacaccaacctctggcttccacgtgcacacatgtgcacacacgcatgaacactgtcttactgttctatcgctgtgaagagacaccatgactaaggcagtgtataaaataaagcatgtaattaggggctggcttacagtttcagaggggaatcatggtggaaggaaggaagcagcctggcatggctctgcagcaggagccgggagtttacatcttatccaaaagctggagctggagagagcgggactgggccccgtgtgggcttttgagaccgctgctctcatggccctgcttcaaacctccaggcaggtgtccagaagcagggctcagcatggctgtcctctctgcacagtgcccgggtatgctcctgcctgcaaggcctcaccagccacgtttcctccaagtattctctcatcgacatgcaactgttccccttcctggtacccgctggcttctcaaatgctattatacactgtgtgtgtgtgtgtgtgtgtgtgtgtgtgtgtgtgtgtgtgttataaacacagcatagccatcttatctccctcactacacacacacacacacacacacacacacacacacacacacaaatacacatacacacatatgcacagacacacaggcacatacacacacatgttaacacatatacataaataggcatgcacacacacacacacacacacacacacacacacacacaatgtacacagtggggaaactgacccccagtaaatgttcaatgctctgggtttgcctattgttgtctcggtgctctagttttgcactgatacactttgctgcctttcacagagtatagtaatatggcacctattttctcagatttatttactttatgtgttgggtgtcttgcttacatgggcatctatgcaccatgtacatgcctggttctcacagagctcagcagagagcatcagattccttggaactggacttacggatgattgtgacttgccatgtgggtgctgctaattgaacctggatcctctgcaagaacaagtactcttaacccgtgagccattccttcagccctcatgtggggtcttacaaacggtaactggcagatgagtgaacaaaagctaggcaaagcatttgtgaacagtcttaagctcttcactagtggcaatggatctgcaaagccaaggaagaatctgtccaggttcaagtccacatactcaccaggagaggcacagttaccgtccacggactcaaagctgcaagcgtatgtgtgtacaggaacataggcagccgaagtattgagggacgggtccgaaacgatgacattataaacaactccttgtccccaaagggaagagaaggacacagttgttttatcgtctgatgtcagggtaaccacctaaagccaaaacagcaagtggtgtgtgtacatgacttttaaaagctgtggtcactgcggttacctgcacaaaccaagccagtctacactccagtgtggagtctccaggagctactaacagctgatggcttctgggacgggaaagtcagtttcctttttcacaagactttatttttaagtgcatatgcttgagtgtgtgcattgtgtgcaatcctgcgtgtgaatgcacacttgtgagtgtgggggggtgtcagatcccctggagctggggtgagcctcagtcctgagcctccttgtggtgataatatgatttatgatctaataaagcaactggagctaaaaatactaagctagccacagccacagaaccatggtcagtggtcagtggtggccacacctttaatcccaggactcgggagacagaggcagatgtatctgttagttcaaggccaccctgggctacatgaaattgatccagtctaagagaaaaacagctcacacaaaggtgatctcagaacttgggatcccacactttcaatcccagcactagggaggtggagacaggagctcagagactgcagcccaaggcgtggtggagaacagcgcagtctaccttgcactctgaggattcgtggggacaggatcacccaggatggtctgaggtagatgtaagagctagtggccggctgctttgcttatctgatcttcagctttaaccccaatatctgtctctgggtgtttattattcttgctacaccgcctgaagtgagtgctgggaactgaatccaagtcctctgctagggcagccagtgctgtcaacagctgagccagctctccagcctgacagttttctttaagagtgtacagcccagtaggttggcccttctccactggatggtcatacccatgagtatatgcgcagcacaaactggactcagtgggttatttgaaacaaacaaaaagacacaaagttgggagggagttgggggtggaactgggaggagttagagggaggagttgggagtaaatatgatggaaacacatggcattcatgtatgaaattctccaagaatcagtaaaatgtgttaaaatattaatgccaatgtgtatatccttcagtggtttctcagtttttaagacatctccccttacacttgccagaagctcttacctaagttactgaagtgtacagaaattcatcacctacttcttctcccaccaggatgatgaggtcacgatacggctgccatcaaaagagagctgactggcttctcctcaaaggctaacaacatcacataagagcaccggacccagccacataggcaagaaccagactcaccttgaccgcactggccttcacctgtgacacctgggccatcctctgcagatgctggagtagtgaggcctcggtgaggtcgccctcggggagaaagtactggtagacatcataccgcagcctccacctggactcctggcccgtgctcacatcgcagggcggaggctccgcacctctaaagccaaccaacaagactgggcatcagtctcttgtggctcaagtccttctgcagacactattccactttcacagctgtgagtctaagtggtactctggagaaaagcagtacacagcgatgggctgggctggtgttgcccctccctgcctccagtgtgacggtactgaggctggctttggggagataattagatcttgaagtcctcctgagtgggactggtgtccttgtaggtaggtgaggcccctcacagctcccaggcactcttccctcctcctgtggattcaataagaaatctgcaacctgcaggaggcccccgccagagcccaaaagtgccagcctcagaagttcgagaaggacacttctgggtgtagtgcacagctgtaacctgggaggcaggaggagcatcagtgcaagatcaagtcaagcctggtctacacggaaagttccaaaccagccagggacacattgaagcaaataaacaaatgcctacaaataacaagtaaatttctgttgttcagaatgcacccatgagtttatggtacagactgctgatcctcagtctaaggatctgaaacctggactccgtgggctccaccgtttctgttggtattctgggttctcagattagggatgttcaaccatcaaggtccatgcaagtttcaagcacttctggccccaaatgtttcagataagggattcttaaccgattctttatgatatcagctctctctctctctctctctctctctctctctctctctctctcacacacacacacacacacacacacacacacacacacacaagcacatgcactgatatgaagtgggttggcacagagcaatgacacttttgctctctgaccatgtaggtcaagtgtgtgtgtggtagggagagagggaaaaggctctgcggtagaacactgatagagagaaaaggattaaaataagagctaagatagggccaagcatttataactaatagttaagtctctgtgtcatgatttgggagccgcttggtggcctaaaggaaagcctgctacaccagggcacccagtacctctggcctttatagggacctgtacttatgtgcacatatccacacagacacacatacatacacacacttaaaaataataaaaataaatctgtaagtggggcgttggtggtgcacgcctttgatcccagcactcaggaggcagaggcaggtggatctctgagttcaatgtcagcctggtgcacagagtgagtgccaggacagtctccacagcaataccaagaaaccccatctcgaacaaaaaacaacaagaaatctttaaaaaaagaaaactaagatgtacttccaagctcacatcacacctgtctcttcaagtaaagaactcagaagtgttgagatgattcagtataaacaatagctcaaatattagcactgacctttaaattatgccaacaccgccccaaacaaacaaaaaagacagtccaacttcagcatagcaaacatgagctgaggcagctggctgggcctgctctatgtcatgagtgccctaagaggggtttcagcctaagaggggaatcggcggccataccttgcatagcccaggttagctggtgcaaacttgatagttgtttcaaaaaaattatagtccaagtaaatgttgggatcaatatctaggtcaaactccaaattacagcctccaggaatgggatctgggtgggaaacggtgagattaataacccaaggattcttaccatgcgccaggaagcgtccttcccgagaacctcctactcagcgtgcagcacccatcatcgctgctgtgtcacgactgatgtttgcaagtgtacagttcccttactccctttccttcagaatgcctttgtcaaacccagggctgtgtgctctccaccacagagctgtccccaggcccactccccaacagtctgcgtttcctcaccctatgctgttgaaagaactccctgactgactaccgctctgtcactcagacactgctggtcacctctctggacttttctggaacttactatgcaccatcctggctcaggtgttcctcctacccccagaggtctcctcagcactgtgcctatacctctgtagttatcactgttgagggcgtatcctttcagaaccccaaggacaggacagtacagatgcctgaacactaacaacaccaccccaatacagtgcttgacatgtactcaagaatcaaatttccccgggtgtctcagttcctgtttgaacaatcctatgcatggccttggctttaacaccagctgtctctctcatctttctttaccccaggtcagtattctaactgccaactctgaccttccaatcaggtgtcctacaagcacctcagactcactgtgtcccttacagaagtcactactgactccatgccacccctaaaagacccaggtccccgaacagccccatatctaaacctgtgtgaacagccccatatctaaacctgtgtgaacagccccatatctaaacctgtgtgaacagccccatatctaaacctgtgtgaacagccccatatctaaacctgtgtgaacagccccatatctaaacctgtgtgaacagccccatatctaaacctgtgtgaacagcacctgtgtaaacagccccatatctaaccctgtgtgaacagccccatatctaaacctgtgtgaacagccccatatctaagcctgtgtgaacagccccatatctaagcctgtgtgtagcacaatctcagctatgtcccctctctgatgacgtgcagtctctgcaccggttccccaggcctggctcaggacctgtgttcagactatcatccttacaggtgtacccagtcctgactcccctctttcttcctcatgtagctcaggctggcttcaacctgccacggagcatactctgaactctgagtcctcttgcctccacctgccctgtgctggattacaggcaaatggcaggggccagttctctggacatggagcccagggtatcacgtatgctgggcaaacactgaccaaccaagctacatcatcaggccctctatggtcagctttctaaagaagaatagacgacagcagccctctgcccaaactcgccacgcttcctctgagccctccttagtgctgcatgcaaactctcaaggctctttgctctccggctctagacacatccatagctctccagacccgcacctccgttaggatgagcacactgccatctctagatataacacatagctacgaagggctggttctgatgctgctttctctgcctctcttactctgaaacactcctattaaataaactattttgccagactagttctcctcaggtttccacaaacgaagctcacattccacagatgaactgagacaggaaattacctctttctgagtaggagagtggaatggccacagtttgaacaggcttggcatctttcgtctccaaataccaagtgcacatagtctgctcaggtctaagcatgaaaaccagccctctgtcattgcctgtccccgaggtgccgggaaggagagtctgcatttggaaagcaaagccaccgtgaagacagaattgagaaatcacatacactgcagagctaacccatctgtacagccctctccaaaccgctcaaaacaaaaagaaaaaaagtctacttaaagagttttcatctctacgttcatatgtccacaccttcgcatacaggaggactccctgaatcacaccgttattaagggctgcagatgactcgacagctaagagcactggttgctcttccaaaagacctgggctccacggccagtgttcacacgatggctcacaacagtctgtaactccggttctgggggatccgataccctcttctggtctataaaggtaccaggcacatgtgtgctacacaaacaggggtgtattggcatttgtataaaataaataagtttagcaatacatactactgcctcagtcagtttgaactgctgtgatgaaatccgacaggtttcggggtttataaaaaacacagcagactgaggaaggcattcttgagggctgttttatagggacgctatcttattggtaaaggctgtctcatgagcacctcccacttatggcttctaagaatctttatgtgtatatgtgtgtgtgtgtgtgcaagtgtgaacatgtgcacatgccaaggatgtgaacacaccactggaggtcagaggttgacactggatatcaccctttgtccctcaccgatttattattttatttaatctatatattttagatttgttatttgtttcgtgttatgtgtatgagtggttcactgcatgtatgtacgtatgtgtgccatgcgtgggcttgtggccctcagaagtcaaaagagggtttcagatctcctgagactggacttggagatagatgggagatgccctgtgaatcctgggaactgacccaggtcctcttaaccgctgagccatctcgacatcccctccagcttagtttttaaggtctctccctgaacctggggctcactgattggctagacggaccagccagtgagccttgattccacctccccagtgctgggtaacaaacccataccaggcctggctggatttctgttttgtttggttttggtgggttctagagatcaaactcgggccctatagactgtgccatctccttagccctccgtttccatctcaagtgtcatggcctgggtttcattcccagcttgacgggggtggtggggtggtaaacaaaaactctaggaattgtacattgaacttttcaggttcaactgaattaagatttattctgtcaggttctgagggtagcaagacaaaacaggagccttggccccaaagagttcagtttacaaaaagcttttgttttaaagatttatttagtgagttacttattttttttgtgtgtgtatgaacatttttgccagcatgcatttctgaacaccacatgtgtgcctggtacctgtggaagccagaggagggcatcagagcctctgaaactggagttagggatggttgggagccaccatgtgggtgctgggaaccaaacccaggtcttctgcaaaagcagccattgctctttaaccactgagctatttctccagcctgccggtagacctgctcctttaagacaagggtccacgtaggccaggcaatcccagcctcatagagcagccgaagctgtccttaaacccttaatcttcctgcctccagacagagtattctcctaagttcagggaatgaaaacgggaaatgcactaggtgtgtttcaacttggcaagcctcaaagggagtggtaagagtcagtggcctcaaaggaccagttgccatgacaaccaaaaccaaacacccgagtgccactcgccattggaaggggcagagaaagaacactgcttttcacagttatttctagagccctgtgcagttcagactgtgaaccaaggtaacacagggaaccctaggcaatgagatcctgtgactaaagatgactgggccttgctggagaccaggcccacacataaatagacatcacagtctaacacacaagacttgacattacagagatgatctccttactggaataccctctgtacttaccttagtaaatgaaaccgtggtgttctgatattgtgagtgtatttggaaaagaaggaaggtcacattgcctgaaatatggcgcagaatggcctcctgtgggaggggcctgctgagcagaaggtgtgtaaatttccccacagaaaattccaggaaacctacaatggaaaaattttctcattacaatattacacctcttctatcaatttatgtaaattccattcaaaaaaacatacaatgccaatctaaccctcagaaaacccccctgagagccaggtatggtggtgcatgcctgttatctcagcacttgggaagctaaagttgagggatctatgcaagtgcaaggctagcctgggctacagatcaagaacctgttgttgtttgggtggtttgtgtggagacaaggagacacagacattgcaagcctgaattcacagcagccatggttccctgtactaggcctgtgtatgagtggccctgtcaacaatcatggataggagaggggctcggggccctannnnnnnnnnnnnnnnngctgaattataactaatgatacagtctagggtgtcactgccttcagctgtgtacccactattgagcccatcagtctccaacaggtacttccaaacccatgtgtggaaatgacaaaccatttcatttgttttttcaaacacccctctcttaagaacacaaatgtgctttctggcctgtctgctgcagtggggtccatgttcctggccctcgggcatcgctgacgtttcactgtgcaaggagctctcggctcatttctgtcctccattttctggtttcattcccaccacacacacacacacacacacacacacacacacgcactcacacacacgccctcattctctccatttggcaagtatcagcaagtacttataaaatcactctgcagctaaaacttgggccagcaaattcaatacagctcatctctcccaggcgcctgccaccatctctggcgcttgcctctaatgtgctctagaacatgttcaggtggccattgttgtttcccatggcacagactctgagccacaacagctcagaaggcctggaagagactgtagctacctctagagatatgctggtggtcaacccaatgctcttcagcccatgatttccaagacaccaacatcctagaacgacagcgaagaaccacaggccaaaggctcagcagttaagagctcttaactgtctgctcttccagacagttcccagaacccacatggcagctcacaactgcctgtatccagttggggggtccctcgtctggcccacctagagagccaggtacatatgaagtgcacagaagtacatgcaggcaaaacacctaaacacaataaaataaaatcttcagagaagacacacacaggagcacaggggagctgactgaggaacctgcctgactctattttaaagacaggaaccagatgctgtaataagtctctatttactgtgagagctgagagagctgagttgttctctgtttcctaaaacctgaccttccctaccccgtgacctggatttgtttttgagaataccccagcttccctggccctccccacccctccctaatcacagggggaacacatgactctttctaccgatttgtttgtatttccttattgccccattgcctctcttctgtaaaagtactcatgattttactccttaaaaggggcccaagagatggactcggggctgctctctttaacccagctttgtaggaagctggggccaactcttgggtgcactccaataaaaaacaagcttgcttcaaacttggttcaaattgtggtagtggtcttactctcaccgttgggattaacgctgataacttggcgaatgatgtcatcactgagagtacacgtcaaggggctttctttacattcctttttcaagtttcaaagtgttcttaattcagaaagaaatgtcataatttgacaaaagctttcagctttgacagcctcaagattcaagttctgcctgagtctacattttaaattcattaaaataacaaacaccaaaaaaaaaaaaaactatgttcaattctcattaaacaatacgggacacctgagcacatgtctactgcttcccctaatgcagacatccatgcccagttgtcactctggtacgggtatcaccatccctcagcatcctcaggatgcaggtgccaaactctctaaactaccagtccctgaccatgcctcacataaaataggtacatgcataggagatgaagagatggctcagtgggttagagcacctgttgagcaagcatggggacctgagttcaaatcccagcacccacataaaaaagccaggcacacacacttgtaattcctatgctacagagaacagagacagaaagatctctgtggttttccagccaccagtgcagctcccagttcagaaagagaccctgtctcaggggaatcaggcagagagcaattgagcaggacgcctggcaggctcctaacatctcttgctgcttgcatgcatgcacacacttgcacagacacacacatgcacgtattttgaaaatggtgttgtgacagacacacatccacatgcataatttatccgtggattatttgcatacctaacggaagtgctccatcatcacgttgttaagagaacgacgacaagaaaaaaaaaaaactgtccactttagcacagttgcactttttgttgtttgtttttggttttctttttggtttttcgagacagggtttctcactctggagaccctgtttggtaattatggtatgcatgctcaatgagatactaaatagctttaaaaggggccaggctagaattacccttccccctcagagctggcatggaacccggggcccatacctgaatcacaagtgctctgccactgcgatacggcttctgcccctgaattatcaatatctaaggcctagccagtgggctgtcagacagttacatatctctcttcttgcatgtatatggaaataaacattagacatcttgatactaagccttgaactcagagttggactccatacccacaagctttgtatcctgctgattcaatcagccggagtgaaaatagcgttttaaaagtgcatccgggcgggcgttggtggcacacacctttgatcccagcactcggcgggcagaagcaggcggatctctgtgagcttgagaccagcctggtctacacaagctaggtccatgataggctccaaagctacacagagaaaccctgtctcaagaaaaaaaaaaaaaaagtgctatgtgaactgcagatgactcagaggttaacagcactggctgctcttccagaggtcctgagttcaattcccagcaaacacacggtggctcacagccatctgtaatgagatccggtggcctattctggcctgcaggcatacatgcagaaagaacactgtataaataaataaataaataaataaatttatatataaataaatacatcttaaaaaaaaagaagagaaaaattactatgcatagcatgtatacttttaatctcggtgctcagaggtagagacaagaagagcggagtcaagattatccccagttagacagtgagtttgaggccaggctgcacaacatgagactgtctcataattccccaaaataaaataaaatagttctgtctttcaggagagtgttctaggaagcatacaggtcagatgactattgcatgtgagatttttactgctatatagtgacagacggcctttgcccttacagttaaactatacctaagttgtattcctgtctgaaaactcataaatgaaaaccaacagcccgagagactggtagggtgcaggcctgaaagtttaagctgaagtctctgccttcaagaactccacccaggcttccaggaacattgagaactcttgcatggtgtgggctgcatgtttagagatggcgcttcctggaggccccgccccccacacgcctgtgacaagaaccaggcagaagacggataatgaaggccggtggggagacactgtcaatggcatctaaaacccggtcctgttgctttaacatcggtaacattgagaacggatgccttaaattatttctcttttccaacacggctcctttgtcactattctgtagttatcagaagtatccttatcatcaggacattacaatacatcctggttgttggtgacactcatgtggaggtgatctgatgcccagactctcccataccactaaaataaaaatccctagcaatagctgcagatatgaatgtaaaaacaaacacttgttcaaacagcatggagaaggactagaactaaaactcagttgccagaggtcttgactagcaccgccaacaatgcttaagcaggtgattgttgctgtgatctccacgctggggagatgggtggagacagaaggatcagaagttcacatcatcctcagctgtgtgggtagctcaagactagcctgggctatacaagaccctgcatcaaaaaacaaaacaaagttctccaggtaactgagaactgcaaacatcatgctcggtgagtgagagagacatacacacacctctccattcttttgttttgttttggtttctcaagacagggtttctctgtagcatttggagcctgtcctggaactcagtagaccaggctggcctcaaactcacagagatccgcttgcctctgcctccagagtgctgggattaaaggcgtgctccaccaccgccccagccggctacctctccattcttaactgagctgccttgtgtgtgggaacaactggccatccaagaaccattgcacaatttgtatagaagactgcattttaacccaagcttgggtggtttccctcctagctatgcaggtctttgtcatatctcatgatccagtgtctggcactgtaccagtcgcctggcagtcaatgcttgttcaacagagactgaactacgtgacctgaggccaggtatttatttcctctgggcctgtgttctctcacagtgaaagggagggaacggggctacagtaaccactgggctgcagagaccaccagacacaatagttttacagccatcagatgctgcgcagtgggacgccgagctcccttggtttgccagtgctttggagatgcagagcctggaattaaaagagcagccaaaaatacccaggcattctcaaactggctggccttactgagaacggagcaggacgggagacgaagagatgctgggattatcataagcagcaatgaggggactcccacagagtgacaatgagagatactcagtggtggggcctgggggacagcttagtggtggatgcttgctcggggttctgagttcaagccccaacaccactgaaagaatgggggggacgacacataactgaatgaggccctgggcaggagagagggagagagagaagagagggagagagagaaagaaaagggagagagagagagagagagagagagagagagagagagagagagagagagcaggaggaggaggaaagtcaaaacagcttctacagcatacatgatagaaccgttatttaatttccttttgtttggctttgttgtatttgttttctggtacttcagaatgagcccagagccactcaagcactaagcaacagtccaccactaaaccacatgcctaggccctctttaatatgtgtatttcaaggcagggcctaagttgctcacgctgcccttgaactcactctatcgcccaaatgggccccgaagtttcagtcctgcttcagcttcccaaagagctagctgggtcaggacaagcctgagacaccagacctggctgcaaactgcatttcatctctcttcacaagagacttggcaagagaagacacccccaaaatacatcctgcagaagttaataggagcctaacttcacctccaagccatctggaaaaggagtcaccagaagcgtttggcaggcataattacatcttatgactgggggtgggaagaagacatcaaagggccttacagccaagatggcgaggttactcacactgcactctgtgcctctgcttttgtctgacattttaaaaaacaccccaactgctgcccgaatagaaggagctggttttctattttcacgcacactttccatccttaatcggataattttttccttccactaactccatcctagaaagaccttccactcctaatctcttcctccttcccaagaggattttatttatttattatgtatacaacaatctgcttccatgtatatctgcacaccagaagagggcaccaggtctcatatcggatggttgtgagccaccatgtggttactgagaattgaactcaggacctctggaggagcagtcagtgctcttaacctctgagccatctctccaggccctcagatccctatcttaaaaccacacaactcctccctttgctctggtactaaaatgaacctctgacttctctccttatctatccgacatacaacagtcaactttaggagcgctgacaaagcctagctttcctaattcttctgtccaaacactctgagcaaaaatgacccagctacttcagcggactgacattcaattgtcccttaccatttttatttgcttgtgagttgttggtttgttttgaggcagggccttgttatgtatcctacacaacaagggtcctgtcctcaattccacaaagtaaatgtataaattaaaaggacacacaacaatgaacacatggccttccgtgtggaaggaagtcaccacgtccatctgtactgggcccatagccctactcaaagccctttccaaggtactcaagtcttaaaggctgggtttccaggtgagcaactgggtgtgaatctaaaacaaaaatgaaggcatgtgggcgagcagagcatgggactccaagagaggggtgtctgcttggacatgcagattactcctccccagcttgtccagcaagcagcttcttcagccaacccagaagctccatctctctcccaaccctcactaagcatcaagccacgagctgggtcctcggtcccctcatccccccgaggtctggtagatccttctaaattacagtggtcgtccagctgtatcataacaacccagttgtgtctccgtgccagccaggcgtagggaattccagcgtttatttgagctgctgagctccctgggtcccatccctctccttcacaaaactatactaaccaagggcagaaagaacagcacacagccacagtactaattttcaacttaatacttttctttcttgatttttgtgtaaaaaaaattctagatattaagtactgaaactccaaactagaaataaaacaagagtctggcacccagccctctccagactcagaggctctagatcaaccccaaacgcaagcgctgcactctctcacctcctcctgcagaaggttgtttcagagacaaggattcacagaaaaactacatataaaccctattgctgtgaaagttctttttaagatggggtctcatgtagcccaggatggcctcatattccatatgtatttgaatctgactttgaactccaccttctgaatgctggggttctgggctcgtacccccacaccaggtgcctgtgggctgggggcggaatcaggacttcttagataccaggcaagcattctaccaactgagccgcatctccagtctccctgagcaaggtaaccctttccagaaagtggctttgctaaagtataagggccctgaaatttgctgggagccacacgggtgttggtgtcactacctactcctgcgtgaacatcttgagcctccagcggagataattatctcccggggctttgagtgttggagtactcagccgaggaagaccacctagcacactgccagaggaacacttctcttcaaggaaatagtgtgtgtgtgtgtgtgtgtgtgtgtgtgtgtgtgtgtgtgagagagagagagagagagagagagagagagagagagagagagcacgcgcgctcgcacgttctacacacgcatatctgcagttttcaacactagccttggctgcaggaaaagttcctaaagtgcagcctacccaaggcttttcagagataagcatctatcccgtccatcacccagaagactattgttagcactggtctcaagctcaagaccaggaatgtacttaacttcaccaggaaaaaaaaaaaaaaaaagcaagtgaccaccgcctggcacgggtagagctttccccatttcccattatcgcccacccgaccggagcagtcgtgaaacccgctcctcccggcacacgacctaggattcccagcccctctccaactgcaaaatccgcccgtttggagaagcatctagatcttggagtgtggaagccacctgctgcttggcacgcctcggttcctcgacagacgcggcggtgctgtgccttggccgaggcgctaggctttagctttagtctgtctgggccggactctgacgccccaggctggcctcgaactcctactactgcctcagtcagtttgaactgctgtgatgaaatccgacaggtttcggggtttataaaaaacacagcagactgaggaaggcattcttgagggctgttttatagggacgctatcttattggtaaaggctgtctcatgagcacctcccacttatggcttctaagaatctttatgtgtatatgtgtgtgtgtgtgtgcaagtgtgaacatgtgcacatgccaaggatgtgaacacaccactggaggtcagaggttgacactggatatcaccctttgtccctcaccgatttattattttatttaatctatatatttttctctctctctcctctctctctctttctgtcccccctctctctctctctccctccctctctctctctctctcctccctctttctccctctctctttttctccctctcctctctttctgtcctctctctctctccctccctccctccctccccctctctctctttctctgtctttctccctctctctttttctccctctcctctctttctgtcctctctctctctttctctctctctctttctctctctctcctctctctctctttctgtcccctctctctgtctctccctccctccctcccaccctccctctttctctctctctttcttgggttttacagacagggtttccctgtgtagccctggctctcctggaactcactctgtagacccggctgttctctaactcagtaatccccctgcctctgcttcctgccatcgctgccaggtctcctgtgtctttctaacggtgcaaattaacttttcttcttgggatcaggtctcatgtagccggtggcctggaacttctgacctctggctgcctccctcccaaggaagataaacttgtatcttcactgatgaattttattttgttgagacgggggtcttgctatgtagcccacattggtctggaactgaccacagtcctgcctcagcctccccagtgtgcaattgtgaaatggagtacaatcgaggcaaggtgctcctagccacaaacaggccgttcactgttttaagaagcagttacgacgctgggcggtggtggtgcttgcctttaatcaactgtggtgtataggcaatcacccccaccccgcaaacacaccaaataagtaaataaataagatgtaaaaataaaattttaaaccggtatcaagaaatgctccaagtgttgtttgtaacaaaggataagcacttggcattagtcattggccagataacctgttagagccaaataaccccatgtggccctcagcagtgcttcaggaagtaactgactcatttgacgtgtttgggaaaaaggctattaatttatgaagcaacgtacacatggggttttcttccccttaaaatatgcatttatggttcagttcatagaaagataggcttcagatataccacgtgtagtcaatgtttaaaatactagcaagtagttgaattaatgatttttctctgcatatgtctatattaaaatgctacatttaggatctgcatctgttgaataagaatttgatttttaagagataggtttaatttttaaagtttgcttatccgacggcattgtcaacccaacctaaacccgaagattctccaaagaccgctgtttctttggggaggacagagcattgtcataggaacagatactgcagcaggactgcacaggacatcgtagaccaagggcataagaaggcggaggaaggggaagttattaaagacaaaattaggaggattacagcaggcgttttgaaacaggagccctttgccacaacgattaacaagaagagtggtgaccgtttgaagtgtcgttctgaggtgggacagtttctgggcctatgtccttgcataagggtgcttttgaaagctcaagtgtgtgtgtgtgagtgtgtgtgtgtgtgcgcgcgcgggagcacgcatgtctgctcgggtgtgtgtgtgtgtaagccagaggcaaatcgtggatgctgttcctcggaagaccatgttggtttttaattatttttaaattttgttttgttttgttttttccagacagagtttctctgtgtagttctgactgtcctagatccagctctgtagactaggctgggctcgaactcactgagatctatctgctcaaggcgtgtgccaccactgcctggcctggttttccattttttaaaatggagtctctcacaggcctggaactcagccatttggctagggtgtctggacagcctcaaagatctccacagcctcagaaagttcatggtttcagttaaaatgtatgcaaacattaactgggcagtggtggtacacaccttaatcccagcactcaggaggcagagggaagcagatttcatgggctacagagctcctaattctagcacaggcagtgctacacagagaaaccctttctcaagagcaaacatgtatgtaaacatttgagtcttgtctggaggagaggctcttactatagcttggattttaggagtctcccactagtccacatgccacagacatttcctcagaatgttactgccagaaagtgacaaaagctttaagaggtgtattttaggaggggtcactttaggtaactgtggtggcccttaaagggggtactggagtctgggtctcttctcctctctctccttttgtgttctgaccatagaatgagttccaccattacaatctgctgccacttgggccaaactaataggcccatcaataacaggcagaacctctaaaaccatgagtaaggtgtcttttgttgactggctgattatctcaaatcatattgtagtatcaaaaagctaacacagacccacagccttaacaggactcttcaaatagcgcacagataagtcaggaaagccaggggttgtcggggaggggctgaagttgatgtgcctagtagaagagtcttaggtatgactaaactctggccaagaatctttggccattgcaacgtgggttgtcttgaggtggcctctgtactgcagacactcaagttctctcccactgggctgaaaaactcagaactctgtattaagcccatttaagtgataaagtgattaaacccacttaaacagtgatacgctacagcctaccaacagatcacagtctgttttaacatttccttcagaaatgcttaaccaagctggaaagatggctcagcctgtaaagtgtttgctgcacaagcccgacagcctgagatcaatccctgggactcactgaaatccctgactccactttgaccttcacatgcatgttgtggcatttgcacacctatgtatcacacacgcacataatgtatacatacaaaaataattttagaatgcttttgtttttgtccccactcttaatttttgcttttgtataattaaaaaaaacttttaaaatttattttatatgtttgggggttttgtctacatgcatgtctgggcacaaacccagagatcttcctgcctctgcctttcgagtgctgggattaaaggcatgtgccatcatcacccagctaactttttgttttattagacatgctctggttatgtagcgctggctgtcctggaaattggtatgtaggccagtctgatctcaaactcagagatctatactgggtttaaaggcaagccttaccacacctgaccattaatttcatttataagaggaagtacaacacgaatggaggttcccagtttgtccacaaaggtaaaatgtctgttggtggaaatgaagagagctgcaaaaaggaagtaggattttctagaaatgggtgggataaatcctagaagttgagatactcaaaaatgatttcctcaatatgactgcaaaacgcccttcaaattgttggaattttaaatccccaaagtcacatgttaatagaatttaagaggggagaccttcagaaggtgatagggtcctgtatagtttggatcttcagagccccttaaaggcccatcagtgtattaatgggctacaatgtgattaaagtgttcttttgggcactctggttctgccttgtaacaggccccaggtctcaacacaactgattatgacggaagtaccatttgggtcatttatgaattttaactcagcatgtagacagcaccacctgccaaacaaagacctaatcaatccatcaaagtccagagtttggggaaagtctctgaatgttctcacttgctctttggcttctgtagttaaacttctggctaactgttaattgaagtatgtctagccggggagtggtggcacagacctttaatcccagcactcaggaggcagaggcaggaagatctctgtgagtttgaggccagcctggactaaagagcgagttccaggacttgttccatagttgctgagaaactctgtcttaaaaaacaaaaacaagactacaatcaacaaaacaaaacaaaacactgaagtatgtcaacccaggatgtggattctggtgcttaaaagctcaccctgaggaaggcttggtgctacagtgggatcctgaacacccagtgcagtcgctggctagctaataaagacttcctattggcttaaacccatgtctgagccgtcttctctagtggatccctgcaacagtctcactgtgttacacctttctctgttggattcatcaagatctcagcaccttgatagtggacttcccagcctccagaatgctgaagtaaatcaagtgtgctctgtaattacccatctgtgttcttcagttatagcaacagaaaacaggctaacacacccacccacctccaacagcaggaggataaccaggaagagtcagtctgctaactatgataaagagtttgtgggaaacccaggaaccaggcatttgcagattacacccaaactaacagaaataaccttcctgctactttttctttgggccgccagatcacaaataacaacacagtgacattgttaattaattaggaaagttcagccttaatttaggcttgttcctaactatttatttatttatttttattttatattggtgtttttgccatgaatgtcaggttccctggaatggagttacagacagttgtgagctgccatgtggttgttgggaattgaaccccggtcctctggaagagcagtcagtgctcttaaccactgagctatctctccagccccaaattagttcttataatttaaatggacctgccctccccccagggtttctctgtgtaactttggaagctgtcccggaactcgctctgtagaccaggagggcctggaactcagagatctcctgcctctccctcctgagtgctgagattaaaggtgtgtgccaccatgcagggcaacccatgttttttaatttgcttgcttttatgtaacttgttacctttacttatctttacttagttttttattacaccaatcacagccatacatcttcccagtgcgcatcacacagtatcactcttcgcatgtaaaactatcaaagatctcaattctaaatctaaattctgaacctgcctaacttgcttattttcctggaacctctcttctggccccagggcccttccctttcctctgaagccttctcttcctcacagctacagaggactgtgtagttaactgtgctgactacacacctcttatctccaaatgcccatctccaaatgcctttcacctccaaaggtgaaaacctttgcctgtcattcctcaccacggcacagtttaacgcttagtttcccacgcttcccatttctgctgtgtcagtttccccactcaagaattaaagcacgaatctagcctacagttgggcaagcacctcttggcccaatccaacaagacacctaactaactcttgatttcctggcgaatgataatctgctgggtttaaccatttgtgaagggttcgccgtgtggtccacctggaaagcacaagtgaaggaaaacaagtgttccagatgacgcccaaaacagaaccccggagccacacgcaagcaaaacacaccgcgggcccgccannnnnnnnnnnnnnnnnnnnnnnnnnnnnnnnnnnnnnnnnnnnnnnnnnnnnnnnnnnnnnnnnnnnnnnnnnnnnnnnnnnnnnnnnnnncccccggctccgccctccagacccgcctcccagacccgcctccccggatccgcccgctccgcccgcctccccggccccggtgagccgcgggatagccccgccctccgccgcagcgtgcgtccttggccacgccccctggaagggagccctgtgattggcccagagccgccataaattacccaatcgccgctgagcggggagcttcggcgtcgctgcgtacgcgggaacatggcggatcgcctcacgcagctgcaggacgcggtgaactcggtgaggctcccgccttagtcggcctgtccttcccgttcttcccgttcttcccgtccttcccctccttcccgtccttcccggggaggggacgagaggagaggagaggagggccggggagaggagggcaggagggccggggagaggagggcaggagggcaggagggccgcgtcgagcggatgttcacaagggcgatttttgttttgtgttgagagagtctcccgcgtacccccctggctgacctggaaatcactgtggagaccaggttgtcagttaaaactaacaaaaaacaactggggagtcataaaatctaaacaacagaagctcctgaaaactgctgccttccataaccttgtcccttctggctgttactctttttggtttttgtttgtttgtttttttgggacagggtttctctgtgtagctttggaggttgtcctggtactcgctctggagaccaggctggcctcgaactcacagagatcctcctgcctctgcctccggtgtattgggattaaaggcgtgccccactaacgccctgcctctgagccacatttttaatcccattaatcccagccctctggaggcagaagcaggcaaatctgagtttgaggccagccccaaagttagttccaggacagccagagcagtgtagagagagaccctgactccaaaaaataaaataaaaaatgtttctgcttattaccattaagagcacaacacttttccactggtagttaaaaatgtccgtgtcatcctggttgtagtttgttctaggtaaagtgcctgtagagtgtctgcctactggaaaaaaacaaaacccagtccctggcctgtgtttttcttacagaaaggtcataacttggcttcttggtaatacatcacttttagagattgtgaatctacttgtgggaaaactgcctactctgtaaataaagtagtttttaaattgaggggctatccctaaatgttggtgaactcaccaagctaaaatgtaaagatttccctgggctgccagccattctctcccaagaaagtactcctttgaggttttaaaaatctcttaatgcagtgtaggagcttatctcagaatttcgtcttcgtgtaggtcctgtagctagggtggtaaggatgctatatggtcttgactcatgttaggaatactgttaatttagctaacttggatgcctactgtgtcaataggcaatgtgtttacaaagagctacccctgggggagcttagaaagatgccatgaactcaagagactttcagatgtgaaaccccgttcatggctagggagttagagtaaactgctttcagttcttcagtgctaaagtagattggaacatagagcagtgttaacatttgttctaccatctggaaacatgttcatctctataatatttatatatagtacttgccatggggttcatttttcaataaatatgtttttgaacagatgaacaatgggtcttgaaagcatttgcaggacagaatacataactactgttctgaataagtttcatttgggtttttctttgtcttaagacagtgttgcaaaatggaatgctgcaacttaaaataaagtcacccaggttagcttttaatgacagctcagatttttgtcattgaaataatgacagcaaaataatagaaacaatagaaatgctgtttcctgattggaagattggaaataatagttgaggttccagggattagtgagaagttgggtgatgggttatacatgtgtttagtttgcagatggtgtgaacttgtgttttcaaattacttgactacattggttttttttttagttctgccttttttgagagagtctcttatgtaactatggctggcctctgcctcccaagtgctaggatggaagttgtgcactgccgtgccccaacaacaaatacattctgagcagtaagattacaattggagtcttgtagaattacagttctgataacttacagtaagaaatttcttcatgtagtacagactggcctggaacttcctgtgtagttgagggtgaccttgaacttgggttcttgcctcctgattaccagaattacatgtttgcgatgttactcctaggtttctgtttcagtgctgagggtccacttcgaggcttcaccatgctaggctagcagtctcccagctgagcttatccccaatacgcccactatttgtttatatttggtagctgctctgcacagacaagagatcatgtgctttgtacaccccaattttgaacctcaggaaagaacagacaatcattcttgcaattagaatagaatgtgttatctaccagttcgactactttggtatcttaggatttgtttatagagttatgatttgaaagagtcttttttttttttttttttttttttttttttttttttttttttattttaagtattcctgtgtacctcatgggcgcctgggacccatggagaccagaagaggctatcaaatcccttgggattagagttacagttgtgagctgtggattcaaatcccttgggattagagttatagttgggagctgtggattctgggagttgaacccagattctctgcaaaagcagccagtactcttaagcatgactctttctgtattgcaatttctgcatctgctaggatggatacccataaacattcgaagagaggaaaacaatcacttcagctactttaggctacattgataccaaatttaatttcacctagactgataccaaacttaagtttaaaccatttaattcaggctagatgtaaatagattgctggtgagagtgtacgattagtgtatgaactccattgtttgtaataactggctcattttatctaaaaatattcctttctgtgagtttgcttagagatcattattatgaagaaattgttgccatatctcataaaatccataaaattgacaactctttttgtaaccttgattttttttcttttttttttcaagcttgcagatcagttttgtaacgccattggagtattacagcaatgtggtcctcctgcctcttttagtaacattcaaacagcaattaataaagaccaacccgccaatcccacagaaggtgaggtctccttagtttgactaacattccttctacaatttatagctcctttgtaaaactgtgactgtggttgaagtgcattgctctatgtttttccataaatgattttttagcatttatttacttggtgtgtatgtgggcaggcctgctatagtatgcttataagaggtcataggttccagacctgttctctcctttcaccatgtggattctggggatcacactgtggtccttagacttggtagcaatgtgggaggtccttctgtatgctatgaataagtgttgctttttttggttgatgaataaagctgttttggccagtgaccaggcagaatataactaggtgggaaatccaaacaaagatgcagagagagggggccggagagatggctcagaggttaggagtactggctgctcttccagtggtcctgagttcaattcccagcaatcacatgatggctcataaccatttgtaatgaggcatgccagaacactgtatacataataagtaaataaatcttaaatgatacatagattagtaaaaatgggttaatttatatgtaaaaagcctggcattggtagcacacgcctttaatcctagcactggggaggcagaggcaggtacatctctatgagttcaaagccaacctggtctacagagccagttccaggatagccttcaaagcaatacagagaaacccagtctcaagaaagaaagaaagaaaaggaaggaaggaaggaaggaaaagaaaggaaagaaaggccagtaagaagtctgagttatcagccaaacaattataaactggcgggtgagacagaaaacatgcaactacatgcccttatctgcaaagctatctcattggtcaaggaatgagtttatcagctcaattcatgtgcctcatgattctattcacttcaataaaagattgttactcccttagaggagagcttatgaagactgaatttctgtttcacctggtcccccagccctttagtcccaaataaacacattgaggcttatattaattataaactgtatagattgaactgagttttgcttgtatgaccttagtaaaaaaaaggatctcatttatgggttcatttgctcaaggtaccaaaatgttgtcctagtatataaaatgacattctatgctaattcccagtttgaattaatgttaagggtataaatagtactgatatactaaaattatactttcaccattaggattatattagaaagctgaacttttctagttttattaatttataatttgtgcttgtgaaaatgtaaggttttgctaatttaacttaatgttgtttttttttttttttcagagtatgcccagctttttgcagcactgattgcacgaacagcgaaagatattgatgttttgatagattccttacccagcgaagagtcgacagctgctttacaggtgaaaactcctttcttttcataaaagtagtagtgatagagaactttgaattaaaggaggtatggcattcaaattaggactaaagtttaattggaaggtattttgggttttgtttgattgtggttggttttttgcttgttttgtggtcaaatctagggtctcacatagcaggcaaacactctataattgtgaactaaaacagcctctgaagattgtgctgaatagttgtccagttttgacctaaaagatcagatcatgtgtattcgaggcagtattgacactgagcaatttaatcttaggcagaagtctcctaatgcccttactgaaagtggagcaaagtaacgtctacaagcaatgtacaagcaaacacctatatattctgattgaaaattagtcttcagggctggagagatggctcagaggttaagagcactgactgttcttccagaggtcctgagttcaattcctagcaaccacatggtggctcacacaatctgtaatgagatctggtgccctcttctgacctgcagggatacatgcaggcagaacactgtatacataatgaatacatgcatctttttaaaaaaaaagaaagaaagaaaattagtcttctaataagtcatagagaaaaattaaataggtatttagaattatctgttactaaagataaaaaaatgattggaaaaccattctgattttaaaataaatacttgtactttagtttctctgcatttcatctctgagcatattaaaattcatgtcttatgaaggctgctagcttatataagctagaagaagaaaatcatgaagctgctacatgtctggaggatgttgtttatcggggagacatgcttctggaaaagatccaaagtgcgcttgccgacattgcacagtcacaactgaagaccagaagtgtcacccgtagccagtcgcttccagattcctagcaacaacagaaacaggtgactgagaaaataactgtttgaagggcactaagaataccgcctcagatatgggcttaagtccctccaacagctggggggcatcatacgctgtgactgtttccttttttactagttttcactctcgatattaaaaagctttaagattgcgattgcaattgagtcatcctcaaacatcatgtcatttttttatctatctgactagaattttcaaggtagatactgtactaatgttcatgctataattaaaaagctatacaatacagctctctgatgttttgcatgtgttgtttttcttgttttgtgcagtacagaatggaatccaggccttgtgtatgctaggtaagcactttgtcactaggccatattccccggttctgacagacattgtatgattgcagcccatccacaggtcagcatagccttaaaggccatgatatgggacatttcaatttagatagtgtccccctccttaaagatggcaccatgtaagtttatatctttgagcaaaagtttctgaaagtctttttaagaaactattagagcagataggaaatagacagtcacctgaaagctttcttcttcagagtgtcacacattctagtgtaacacaattaataaaaacccagagactgatattggggttcaagctgaagatcagagaaagtagccggccactagctctcacctctacctcaggtgaaagggctgatcctcgagctccccaccaagcctcagactgccgcctctcctcactgaggatagagaataaatctccagatgaggccctttgctttttccttttgtacctcctcagtgctgggatttaaggtatgtgatcccaagtggtgagatcacctttgtgtgagctgtacctctttaggactgggtcaaattcatgtatctcagtgtggccttgagcaaacagagatccatctgcctgtctcctgagtcctgggattaaagggcgtgccacccctttctggttctatggcttgtggctgactttgctttctgtctcctcaggcaagcttcaataaatcataaataatatatcaccaaattatagtttgtctctgcctttgtcttcacaagtctttactgcccacagttctcttgtgagagtttttcatcccaaatcatgttcaaataattttaatttccctgtattcttaatttccatgtcttcatagtgaggtacatttcttgaattgtttattctttctcattctctttacctgaaggaacttctgcttttttttctttaattttattatgctgatacattttacatgctctgcctgaatttctacatgtgttgggtgccctcagaagtcagaaaaggatgccagatcccctggaaacagagttgcaagtatttgcaccataaacttggtattggaaatagaaacctagttctctgtaagaacaagtgtgctttttttttttaatttatgtatttttttaggtatcagtgctctgtctgcacgtatgcctgcatgccaatagagggcgtcggatcccaccttagatggttgtgagcctccatgtggttcctgggaattgacctcaagtcctctgagccatctctttagatcttactaacatgtaatctttattgttgtttttcaattagtatacttccaccatatcagtaactcagtggtgttttctctgttacttggatttgttatggctaacatttgtgtcagcatttgcaattggtattactcatccaactcttgattctcactgttgtccaagtcttaaatttctaaagaaccctctagaaaaatatccagagtgtttccttcccaccaagctctcctgtgtttcaaagttcaggagcaccagctctagctacaaaagttacaatagtttattggttaagcctagacatttttgaacttttttgttgttgtgacagttatttattatcagatcttaaaaaacctgtcacctccccgccaagaaaaccaacgacctaaatgttctgctctttcagaggggcagtcagtctttccatctgtgctggtcgtctggggtcggctcttttcagagaccactccttacccgaggaggcaatgcatcccactgtccatgtccccttcagatcttgcttctgttgcttgtaatcgtgactggcttcttacactgctcctgctgtgttcttagtaactggaacagaacttgacgtcaacagcaggcgaatgcctgtttctgtgatcaaatcataaaaggaagtaaaagattagccagtgtattctaactagtatgttttgttgacagggcatagctaatcttactgaaagcagggaaaagagtgctggattcattcaaggccctaagtattgtataacaaatggtgtaccccttatcactttttagcataaatgaaaaccataaaggaggtatcagcagatcaaaccatgagttctattaaataggggctggagatatggctcagtggttaatagcccttggtgataaatcattgagaacggaagtttggattcaagcacccatgtagcaggctgggcaccgtagcaggctgagcaccgtaaacatcttaactctagagggttggatgccctcctctggcctacaaatcacacatgtgcatacactcatagacaggaataaaattaaaataattttctttcagttatgtaatgataactctgccagcctcctgagttcccccaccatgatagggcccccaaataacacacagagattaatattagttacaatgctgctggccaaagactaggatttatttgctagctcagtcttaagtatcagccataaccattaatctatatattttataaatacttatcaaggacaccagcggtatgtgtcctctcttccccggggatcacatggagactctcctctttattatgtttcccagaatcctcctcctctcatagtccacctatcttgcttccctcttggccaacagtgttttattcattaaccaataagacaaacatacacacagaaggacttcccccatcatctcttttctgtctaaataaaaagaagggttttaacattaacatagtaaaatatataacaaaacagttatcaagtaagaactatagttataatatttaattcattaacatttaggaagattttaaaatctatctttgtgagtctaaagtagcttatcttataataactaaagaaaactataaccataactatctgtcttcaactccatcaaagaccatggaaggataatataaaaactctagaactgacagagacatctcgctgcctggacagtcccccaatgttcctctgtaacattgggcatccatattcagcccataagccacagtgtgtcttggtgacttctcagtgaagcaggaaatttcaaactctcatctgtattggcagtttatcagtcatttttctctgtgtcctgtagattatctggcagactcttccatgaagcagaaacattttaggactgtccatcttgttttgtatgttcagaaatcactttcctgtgggtcctgcatgtccagtttatcaaacactccaggcaagagcagtttcttgcccaaatgactaatcttgctggttgaaggcaaactccatattgagtttcttcaatgcccaccctcctttctgacgtatttggtgtgccaggagcaattgtgtctcactgtcatgaaaaaccctaaaccatttaaatgccaaatattctgtaggtctttgaaaggtttgaagaatatccatctcaaatacatctctgtatatctagaaaacctactaacctaattataagttctgactattataagtaattgtaaatctgtatttaattatgcattacattttaaaagatcagtataaacacaatacctaactaaacgagatttcaaatacatatcacaaaattgacctcaaatttgttatcaataaatgaaaatccattccaatacaaagtattcatttctatatcctattcccctttttttcctttaaagagattgactgtaatcattaccatttatataaccccatttaagtgatgatggggggatggggaatgtccttctgtgtatgtttatcttattggttgttgagtaaagtactgttggccaatgaagaagcaagttaggcaggactaggaatcaaggaggattctgggaaatgtagtaaagaagtgttgtgatccagacaggaagtgacatagcagggagactcagaatataagcagggacaaagaggaaatcgtcctcttcctcttccttctgctctcttctctacagagtctccatgtgatcccggggaggggacaccagcggaagatgtcctcgataagataagtcttataaagtacatagatttatgataattaagactgagctagcatataagaaatcctagtcattggccagcagcattgtaaataatataagactctgtatgttattctgggtgcccacatggcagaggggcttgggcagatggagtaaagacttattgttacaaatatttataagcaatatttgggaatttgggcattgttcattccaaactgcttcctgctggttgggggcgatgtccataccatggggatcatgataaaacacagaaacctggccaggtccttgtttttgtagtctgtaaggctgtatcatctcagctgatttagatgttggatcacctgggacactgtttgaggggtcttcatgaaaccatattagtctggaaggaatccatagctttacattttctgtggaaacataagcagaaactcttttcccaagtaacctgtccttatttttaaatttaaaagtcacagcatttttaaaatatgtaagttggattaatttagcagcacctataatcacatgtattttagcagctgtagctctttccacggcaatcaaacaatttaaagacaacagtataacatatagtatcagactctctatttttcatttttacctggctttttactttttattattctatttctttttttttttttttttttttttttttttttttggtttttggtttttggagacagggtttctctgtgtagctttggagcctgtcctggtactcgctgtggagaccaggctggcctccaactcacagagatccgcaagcctctgcctcctgagtgctgggattaaaggtgtgtgccaccaacgcctggcttattctatttcttttacttgcttttttttcttttttcctgagacagggtttctctgtggaaacccacctgcacctgcttttggagtgctgggattaaaggtgtgtgtcagtatacacagctactcattttttattttctctcccaaacctatgtatatttttctttaatgtaaatctgtatcttttcctaatcacatgagtcttatgtgctcactaacagctgaggttttgaccactatgcaaatgaggaagctgctcttaaaaggagttgcggtggtgtgtctcttaaagcctgggaaacattgctcagttaggatctcactgtatagctctgcctggtctagaacaacgtgtagacaagactggcctcaaacccggagatctgcctatctctacctcctaagtgctacgattaaatcatgtactgctatgcctagttacaattttgggggtgctctctgcttcctgaccagatgcaatgtgaccagctgccccaaattcttgccaccatgactcccctgctgtaatggtctgtacccttgaactgtgagccaaaataaaccctttgaagggagaattctcactggtgggctggctccagctagcacctagctctaatccatcttttgtttagcagttactttttgtttctcttgatgccctctctgtaaatcttgactgagtgtttcccaagggtacaaagcctaagcaaaacttggttggggctgggtattggtggtgcacgcctttaatcccagcactcaggaggcagaggcaggtggatctctgtgagtttgaggccagcctggtctacagagccagttccaggacagcctccagagccacagagaaaccctgtctggaaaaaccaaaacaaacaaacaaacaaacaaacaaacttggttggggggcaacctggaaaactgtggtacctccttaatctagaatttgcacttggcattgtcccattataagcttttggcaggatattttgagaatatggaaatcagcttgctaaggtgtaaattggagaatgataaaaggagccctgttgaagggaaagccattggttcagtcctgagaggagaatccaccctgcagctgggaaagttagattcattcttaaggtgcctctcagtctcttctccatgggcctgagtgaacccacacccaatgggcaacaacccattgttgtgcccaaattctgaaccccaaaagcaccaagagacccattctgagacaaaagcaagagttcttaattttaacaagtttaactgtattgactcatcctccatccatgttacatagcgtgtggagtgagaaggacccagaatttattgggtagagcaaggggagtgtctaggggtatgcaatagtctcaggattggtgcacttcctggcttgagcaacctgtcctgtgttgattggtccacaggttgctatggcctataggccctcccagggtgattgctatgctctgtagccactgttaccttaaagaatatccagagccgaccactaacttctgattgcttccttgccacacagagggtatctgacctcctagtgactggggcaggtctggcaaggtcagaaggctggaaactcagcaacttgtgctgagtcagaggcctacatcttgctgggtcttttctgtagcctgtcatggctgcaaaagcaggctgggtgagggtctggtcccttaaaaaattttggtttggcttggtttgatttttgaaacagcatcttgggcaacccccaaacaggtcacgaccccctggttgagaaccactgagcttgggaaacaatacaacctcttggtcagggagctagacattaaccctttcccttttctcactgtgatcccttggagaaattccagttccctggaaaccattgttttaatagtctaatagctgaagaggaactgtagggagacaccataaccacgcctcctaagggctggctacaggtgtgcccaaccatgcccaacagggtttggtcaaggtgatgtcagggtgaagtggtaaaggtttaaagaaatagggaacgcacatggtagctctcttttctctgctgctttggctggctctggtttcctcctgttggttggcatttacttattaaagatatcctgaccattaacagactacatattagttattcaccgtaataaggaacactgtagggagaaatcctgattagaggtaccgctgaccacatgcacttgggcgtggtcagagttatgtaacaagggtttaagacggatggaggcacacacgaggctctctttcacctggctgagctgactgggaagcatttctgggtccatcctgctcaggtgcaaacctggtcactggctcccttgcgtgagtgttttcccccagtaaactaccatttatcaaccaatctgtgactccactttgtaaacatcaatagaacaaagtgttccaatttactgtatcttcagtcctgttacagaatagttagtgccagccagaggagggatggtctcccaggaagagattccacagccctgataacatcagaaccttgctagagaaaatggagcctagacttcgatgggtcagggatgggcaggaccacattgtgatggaaactgcttagttattgccctcaggaagatggattgaggggtgggggggccactggtcctcatttgttcttcccactgcatttcactgctatttgtctctttgcttggtcttttggggatgggtagccaagcctggctggctgctgttgttaaggtcagtgcgctgactaggaactgttaacactgagaagcacaaacacctcaggtcagtaagagtataagagaaaacaatggggtccagagcttaatgaaataaacgtgtgtccagctaagacagcattttatgtcaaaagtctaagattcactgccacaaacctgcagaattatacagtgagagttcagcacatacttcagagatcgcttatctcctgaaggacaggcctcatttagcaaggagatgaatattgttacatcgatgcccatctcattaaccttttatgcaagccactaaggaatactgagtgtgccagctgtgctcatcgcagatttgtgcgaagagctctccccttagattacagattggagatttttcccacaacactacagtgagttaattgtttactggacacaatttcccctatgcactggtgtatttggatgactccccacaacaattcgtgattccagcaagaatgcaatcacaatcaataccctcactctctcaaacagatctttgagtaaactcagaagtctgcccctcgcagttatcttgcttgtcagacagctggtcagtgtccaggcaaaagagacctctattgagacattcacagatgcccaagcacaagaattatggcatgcctagacttgtcaagccataactctcagagagatagagaacaattgtgtcctggattctctctgcctgctgatagggaagtgctgccccaagctaacctcaaagtcaatcttcaactctttgtacttatttttactttggtccattacctagtgacatttaagaaaatagcaaaagcacgcatattcccttcttaggtttcctgttttgttttgttttgttgtttgagacaggatttctctggctttggaggctgtcctagaactagctcttgtagagcaggctggtacagccctgactgtcctggaactcactctgaacaccaggctggccttgaactcacagagattcgcctacatctgccatccaagtgctgggattaaaggtgtgccccactaccacctggcactctctcaattaatgtctttccctttaagaagttcttggaggctttaagcactttccccttgagccatagagaaaagctgacagttacccctttgtgtaaatcttttatccatttctatgaccctgaaaaactctagccttgcaccaggctagctagggctggagagactgggagagctgagacgagagaggcagtagctgagggagaagctggcagaaacgtaagaggataagaatgtagggaagaaggaaactagattagatcagattggagggtcagagacaactaacgaaactagattagatcagattggagggtcagagacaactaacgaaactagattagatcagattggagggtcagagacaactaacgaaactagattagatcagattggagggtcagagacaactaacgaaactagattagatcagattggagggtcagagacaactaacgaaactagattagatcagattggagggtcagagacaactaacgaaactgaattagatcagattggagggtcagagacaactaacgaaactgaattagatcagattggagggtcagagacaactaacgaaactgaattagatcagattggagggtcagagacaactaacgaaactagattagatcagattggagggtcagagacaactaacgaaactagattagatcagattggagggtcagagacaactaacgaaactagattagatcagattggagggtcagagacaactaacgaaactagattagatcagattggagggtcagagacaactaacgaaactagattagatcagattggagggtcagagacaactaacgaaactagattagatcagattggagggtcagagacaactaacgaaactagattagatcagattggagggtcagagacaactaacgaaactagattagatcagattggagggtcagagacaactaacgaaactagattagatcagattggagggtcagagacaactaacgaaactagattagatcagattggagggtcagagacaactaacgaaactagattagatcagattggagggtcagagacaactaacgaaactagattagatcagattggagggtcagagacaactaacgaaactagattagatcagattggagggtcagagacaactaacgaaactagattagatcagattggagggtcagagacaactaacgaaactagattagatcagattggagggtcagagacaactaacgaaactagattagatcagattggagggtcagagacaactaacgaaactagattagatcagattggagggtcagagacaactaacgaaactagattagatcagattggagggtcagagacaactaacgaaactagattagatcagattggagggtcagagacaactaacgaaactagattagatcagattggagggtcagagacaactaacgaaactagattagatcagattggagggtcagagacaactaacgaaactagattagatcagattggagggtcagagacaactaacgaaactagattagatcagattggagggtcagagacaactaacgaaactagattagatcagattggagggttagagacaactaacgaaactagattagatcagattggagggtcagagacaactaacgaaaaactgaattagattagattggagggtcagagacaactaggacaaggaattagagcagagagcggtcaagagagaacagtaaggtgcacacagagagaaagaactcgggttgaggatagtcctttctgtagtcctcagacttagatcccatgttcattgtagtgcctccttttgaaccctgagtacttttgaggcaaagaaccttgaaagttttcggtaattcactgcactgttctcattaggaaagaagcttaattctgagctgagcttcccactgagttagagaaagaaggaagtaaaggtaacagcagagactgaaaacaaccacatggtggaggaaacaagcaccttagaatgtagaggcatagagtcagcaagcaggttggatcaagggaaaagaggagccttacataaataacattaaataaaaagccaaagcctagtattgaccttaaaaacactgaggatatttgaagttaaaggaatagaaaaataacatagcaagtagacacaagaagatatgggcataataccgttttaggctttaaagaaatttagataacaattaaaacttccctgaaaataaagcactaagctagggttttgataggttttactattcattaaaaactggtttttggggctagagaaacggctcagtaattaagagttcggtttctagcatccatatctgacagctcaaagccaccaggagatcagcacccttctctggactctgaggacctgcatcacacatgctcatgggtgcacacacatacacacatgcatacataattacatataaaataaatctagctgcacatggtgcacacacttttaatctcattacctgggaggcagaggcaggcagatctctgtgaccagaccatctggctctatatagtaagttccaggccagccagggctacatactgcaactctgtctcagataattaaatggcattttaaaaaattagtctttgaatttcagttttgcacaaaatgtgggaaaaactatagatttgataatccaattagagaattgaatatatgtttgatctcaggaatgaatgcatggcagttttacctttaaaagataacttcatatgtttgccaatttagatgttcactttttaaaactaaaattcagtgatcattttgaaatgttttgcagctaatggaatcttcgatccattaagtatgataatagattaaaatgaaaatcatacaaatccatcttagtcaggacaagcatttttaaaaatctatgtatggaaaaaaaacaagggagaaacacaaagtattttaaattgtaaaggatagggctggagagatggctcagtggttaagatcccttgctgctcttccagaggacttgagttcaattcccagcacccacatggtagctcacaaccatctgtaactgtagcctcctgagattcatgccttcttcttgtatgtatatatgcatgcagaaaaagtatccatatgcataaattatataaataagtaaatattaaaaaccataaagtatacatgtaaacctataacacacatcacacagcaaggtcagatgctttccctggcaacgtaggatccaagtaagttagcaaccaggtccatttctctttgtgcttgtggctgtcaccaagactttgaaagcacaaaacaagttaaaatggtaatgtttttgaaagtgaagcaaaactcgtgacagagggagcctggggtgaagtacacttgggaggccaaggcaggaggatttccagtgtgacgccaacttgagctacacagagaattctgagcaatcagagctatatagcaagactttagcctcaggaaacatacaaaatgttaaataaatataaaacatttacacagagaaaataaataacagtctatgggtaagttaggagacatttgacacacataaatataacagactggtagaaaaaaaatcttcagtagcattaacaacaaaaattcaaggaataccaaagctgcacagagaaaccctgtaccaaaacaacaacaaaagaaaaaaatcaaagaataagtacagtggaaatgtaagagccgggtaaatatgacaaaatgaaaaaagttacaaatcactaaaagattttaaacctaaacgagtcagtgttgtaatatagttttcttcaacaagtccaaatttaacacaattttaaattttcaacagatttctgtgtaacttaaaacgctatttccaaaaatgtacatggaaatctgaagggccagtgatactcgagataacctcgtgaggacagacaacagagtgatggagcttgatttaatcattagtgtgtagctcatgggtagaggttgctgaccacattcaaggccctgtattcaacccccagcacctgccttctagttatacagggttagatcaaatcatcaatgcaagacagcacagagataaagcagtctacacaggtgtttgaaatcggcatgtcacatgagatgttgcaagtcactgaggaaagagtaaaaacactgcatactgaaacacctgtttacgtaatacacaatgcatgtatgcaaaaataatatgcatacatatagctattgtgtatagaatgtatatttgtgcatatactactactactactactactactactacacacacacacacacacacacacacacacacacaccatacattaaagtcaatgattatggggatcagggaagttaaaatgttcaggagttaaacagtgataatagctacaaaaatctatgactatactaagaaaaacactgtatcattttaaagtgtgaattttacactgtgaaataaatgtaagaacatttaaaattcagcaaccacttcgtagttgcttaggatgtacagagcctgggcttgggctacagtattggaaacctgtctgtctgtctgtctctctgtgtgtgtgtgtatgtgtgtgtgtgtgtatgtgtgtgtctgtctatcatctacctatcgacatatcgaatctacttaactatttatccatctgtcattcataaataatatctatgccaaatgcatctaaaatgtccatgtcaagggcaatatcttagaaaaccacaagagggcagtttgaccttgagtttgggccctacacaggccctgactggagtgatgtttcctgatgctgagagagcctggtggttggtagcagtatcagaaagatgactgttccaccagctccctgggtcccgtcgccgcttcagccccaaataacacacggacaccgtattaattatgaaactgttggccaatgtctagggcttcttactggctagctctgacttaatttctaacccatttctatcaatctaagtatttccacgtgttcttctcttaccggagaaatgtctggagacatgttactcctctctgcctacctttcccagaatcctcctcatctcctagacctgcctatcgtgctgccttgttggccacagagttttattcatcaactggtaagacaaacatatacagaagacatccccatcagatgattttcctggagtccactgaaaattagtgttatgattctgtttgaacaagttattatcctacaggcagaaacgcatgtgccatgatgaaaggattctcttttaaacgtgttaactaaagtatgtaggcacatactcaacagtgaagaattataggcctgccactaggacccaatgcacttggaccaatggagcacttggcagaagttacctgtgagcacatacaacacgcacccaaacctcacacttcatctgtcactttgaggggaagggtatctggtgtggaacctgtacctctctgtcagaacggctctctgaagctttttggcaacatacgtttggaaatattttcatctctttgccatgctgttgtcaaaaacgatgtgtgctatcaataaaaatctatgtgtccactgagctctatacccactcatctcaacgtctttaaatctgaagttggctttgaactctttcatttaaagtatgaaatctttgtttttgaaacctggcaaattcaaatttgctacttaaattttagttatactgtgtgtgtgtgtgtgtgtgtgtgtgtgtgtgtgtgtgtgtatgtatgtatgtatgtatgtatgtatgtatgtattatattaataggtcttctgccaccctgccctccccacaataagtttctctgcctacacagtaagccagattgagccaaattgaaaaagtgtaacaccaggtttattgagcaaaacaactcttgggtgagttcactggtcccagagattgaggccacagaagtggcactcccgaactaaggcggaaagactttatagattgtaggcaaggggtgatgtgagtttgtgtccaagtatggccaaaagctgagcactttaggtggggacttaggtggctggtggtatccggggaggaaagctgcaatagtcgctaagaatgtggaactgggctttctggtgcctttcctttgttcagagaatctctgagaagctgaggtttggagagagacgaagacaggaatggggctttctgaaccaagcaggggcccgctggaagctccaaccaaacgtacgtgtgtgtgtgtgtgtgtgtgtgtgtgtgtgtgtgtgtgtgtgtgtacactcgcgtgcgcgcgcacacacacgctcacacacatgagtgtacacaggtgtgctcaccagaggttgacatcaggatatcttcctcacttctctacctcattttatttccctgatggcagaggcaggcagttgtctatgaatccaaagccagcctggtgtacatagcaagttccaggacagcaagggttacatagggaaaccctgtctcaaagaaaattctatttttattcttactttatgtgtatgatgagtattttgcccgcgtgtgtctatctgtgcaccatatgcctgcagtacccatgggagccaaaagagggcactagatcccctagaactggagttacagtgattgtgagccgttgtataatagggtttggaaattgaacctggatctgcaaaagcaacgcatgctcttaactgctgagccatctttacagcccccagcgttagtatttttttagcgcagtggttggcaaaattaaccaggctttagtgttagacaccaaaaccaaacttgtcattgtactcttttcttttgaaataattattttattttgatgtgtgtgtgtgtgtgtgtgtgtgtgtgtgtgtgtgtgtgtgtgttatatggtgttgtgtgtggggggttgtacctgtgagtaaaagtgcccttcgaagccagaagagggcattagatcccctgtagctggagttacaggtggttgtgagttttagtgtgaacttgcttcccctgcaagggcactcctaacccctgagccatctttccagccctgtaacatattcttcacagacacacattctcagaaaagaaaaaatacttatgttgctgagaaacccatttgatgaaccagtaaaaatctgtgcaatctggactcatgaccacacgtctttggaattctgtggaccaatcaagaagcatgcatccataaaacaataaaacacctctgctgcctgtcaagagtgatgggtcccttcacatagcagtgcgcattaacgactgacacgggctggttagtaactattaggtaacttcacacaagcaatgcagctaactaaccctgtcccttcgaggaagagttaattgttgccaacgataaaattttggcttccaagtgagaaattagagctttagaagacatgtgtcctatttatgacgttttccttatgcctagggatgtttctgataaccagccagtaatattaacaatttcggggtacggaagcattgtttaaaaccctgagcatggtggtgcatacctgttgccccagcgctgggtaggctgaagcaggctgggctttgcagtgagatctaaacaggctgggatctagagtgagaccctgtctcagaaaagggtctcaatgaaggataaggatgactgactgaagtgtctcctggccaagcatggaggcgcacgcctttaatcccagtgctcaggaggcagaggcagccggatctttgtgagtttgaggccagcctggtctacagtgcgagtgccaagacaggctccaaagccacagagaaaccctatcttgaaaaacaaacaaaaaaagattgcttctaatttaaataaaatttatttaaaaaaagaaaatgaattgtctatgtttctataggatatagcttattgtttttaagtaaattaacactgattacctctccatttccaattttggatgctggggctggaacctggagccttgactggtaaatattctagtcggaggtgggaggtccccctgtgtgttgcaaatatgtgttggcttttattggctggtaaataaagctgatttggccaataaccaggcagaatatagccaggtggcaaatccaaccaaagacacagggaaaaagaaagcggagtctgggagatgccaacagctttggagaagccagatgtgaggtaacaccacggccacatggcaatacataaaataataggaatgggttaatttaagttgtaagagctagttagtaataagcctgagctaatagtccagatggtttgtaattagcattgagcctcagagtgattattttataagcagctgctggtaccggatggacggaccatgtcaacctacaggaggagagcagccttcaccatcagaatccatcagaccgtcacaggatgaactaaagtcacagattcctctctgtggcactggggatgaagccagtgtgggtgccagacaagcactctgcctctgggctgtcttttaattttgacagggactcactgcatgatcatctgagcttgaactcatcctgtagtccaggcaagctttgaacttgtgacccgataactgggagtgggggggtatatagctgggagaacagatgtgccatctggcttagctggaagattcttcccaagtcacagctttcttcctcctgggctaaaagtgaaaggaaatctctaggtaaagggttggttatattggtggtcttctctttaggatccttagcacactgtgaaggccttgttattgaaataacaagtctgtcccaaagcaaacaaaacaaaacattagaaaacaaaaacaaaacccagtaagagttgctgtaggcattgcaactgctaaagacagccgagcatcactgtcctgacccagccgcagtctcttacacgcatgttccttccaaatgcttccaaatgtgtcacagcaacgccccgcaccccaagagtgatgcttcgagagactcccctgccatctaaagctcgctctttagcacatggattacatttaattcccgggatttgtgtgtgtcatttctaacaacagctgatgcacgggggtccaggaaggcttccaggcctaggatggaagttcactgtcagcttttttccataaagcaaagggagaatggccaaggagtgcatgctacctagaatgtgggctactcagaatgctggacttacggtgagtgatcactgatccccccacccccatggttttccgggaaatcaggcagttacagagaaaacccatataacattggctctgtgccatatgtataagtttcgattatgaagggtgggacttacctatgtcctcctgttatctttttactttagatgggtcccccgggtggcagaccttaggcaggagctctatctataggacatctagctacagagctcccagggtcagtttagatggaagaagagatccccagggcaagtgtgtgtggggggagggcaattagtgccatttccccaggagccagaatctcctgtaacaacctcagagccccagctcctgccatcaccacaagtgcagcccagctaatgcagtcccggctctcaggaagctaacagcctggcttcactccccatttataatgcatttataatgctccccgcccccagcctgccagatgcaatccccaatcagaccattttaagtgcaagcaaagctgatgagaggcgttcatctcatcatgttgtaaccaggtccagaggcaccaaggtgagaagttagccggaggactagctgtgggctggtgagttctttacccggaggcgcccacgctagcaggagtgattatgctacacatatgtgttggtttcttttctgttgccaccaccataagacacctatttgagttgtaaaataccatgccgtttcatacggtgcaaaagtactgttttgtgagtacaactttttcttaacctagtctcactgcctaatgaaatgtcattatagtataaagaataaaaagcctccaggtggtggtggcgcacgcctttaatcccagcactcaggaggcagaggcagctagatcccagtgagttcgaggccattctggtttacagagtgagttctagaacagccagggctacatagggaaaccctgtctcgaaaaacaagcaaacgaacaaacaaacaaaaaagaaaaaaggaaggaaggaaggaaggaaggaaggaaggaaggccacattggaacttgcagtactcagagatggtagataaccaggagagagactttgcttggttttaatctctgtggttctgggatctccatagattcttggtttgtagattttctaaataaaatctttgacttcttttataccacattttcaatacttctttttaaaaatcccccctcccagtatcttaaaacttgtaaaaaaaaatactgtaaaatctctactatggtggaacaaaattttcactcactctggaaactggtcatctttgtttgattccctttcatcccaaatctgagaacacatccagggaatcgtagaaagtcttctgcagcacagtgaggaatgatgcatcaggacaaaagaagcatggtagctgacaggccggccacacggcttttagcaaggcctaaacagatatttttagtgtttaccagtgagggtcagcacttggatcaacagcgtagagaccggcctctcaggtctgctggattaccatggcccactgacttcctcagctctgtttgctccgtctatctgcttgttggctcttcgactctgtgctgcctcatctgccgcagggagagaagggagccctacccccatggtggaaaacagggcgaaatggcgtttcccaaagatttcacatcagccacggatgagattagaagaagccaactctgagtctgaagagaaagacatgctggagagtgaaagctggagcacccgggcataaagcctccccagtgacaaaagttgagagatgtcacgtgccacacaccttcatcctagcactccccgctttcattgacaatagattcttttctcatacagtctgtcttgactacagcttcccattcctctactcctcccagttcctccccacgtcccctcccctccggatccactccctttgtgtctctcattagaaaagaacgggttccttctaaaaggtaacaaccaaacatgacaaaataatactccagctcttgacaattcatctgacttaagtggtcatctatcttgcctcatgggtcattctctacaagattttgtttttgctatttactaaattgaagaaaaaaacataattaagagttatttttatctgcctaatgtctacttccgtcctcagatttagcatgtcaagcagtttctgaagtgtggttgacttaggtgctgggtatggaggctgaggttggagagaattggggtctgacctgggatatagagcaagatcctgcttcaaaacgtaaatgggagggctggagagatggctcagcaggtaagagcactggctgctcttccagagaaccctggttctattcccagcacccacatggcagctcacacgtctgtgtaactccagttccaggggacctggcatccttacaccaacgcacattaaataaattatttaaaaatacataaatgggggtggcgttcagatagctacacggataaaggagacagcaccaagcctgatgccctgagttcaatccctgggaaccactgggcgaaggtgagcactgattctccacgttgtcgtctgactctcgtatgtatgctatgtaccacattcatccatccatcacacacacaaaacacataaatgtagagagggttttgtaagtacggctattgctacggtttggatatgaaatgtccccaataggcatatgtttttgaaaacttggtccataactggctggtggcattatcctgggggctgtggagagggctttgaaggtggtacccagctctggtgtgggccgagcctgcttcctgatcagccaaggtgtgagcaattctcagtccctgatactgattattgtgtgggtcctgcatgctgtccatgccacggtgcctgcacccctgccactatgagccaaaaggagccataatttctttctgccaaggactttgtcacggtgacaagaaaagcaaataatacagttagatagaagaaagcaacattaaactagttcttcacaagccacataaaactgaggacaaagggctggagagagggctcagcaggtaagagcactggcaggtctcgctgagaatgcaggtttggttcccagcccacatggtggctcaaaaccatctgtgactccagttcctgctctctaagcatgattttattaataatattagattttattaatttatggtaaattttcttagagatgatgtaaaagatctagctttctagctttcttctttttttttaaaaaaagaagacagcagaaaccatttgttattccacgatttcaaaataggtattgtaaatattttggtatctgttcacagccctttagtcttctgtgagagccccgcccactgctgcagtgagagcccagccagcaggaagacaggtgttggggtcccatgatgagggatcagttgttctgaagaagacaaatgtcctttcaccatggctccttatgaactgttacggtttggggacctggctctggaaaattgtccccatggtgtgcacatgcacgcacgcaggcacgcaggcacgcaggcacgcacacgcatgcacgcaggcactctaattctgcagagttcggttaacaagcccggttccacgctactttgtcctagggagcagggagactggcgactctccaaccacacacacaaagttgtgagtgtgcccagcttacaggagacccagggttgacggacacacagccacccctgcctaaaggacacctcggcagaaacaaggtttgtatcaatttttattttttaaagacatttatattttatgtatatggatgttttgcctgcctatatgtcaaattcagttcccagcacccaagtcaggcggctctctaggggatctgacaccctcctttggcccctgcacacacgtgacttatacacacacacacacacacacacacacacacacacacacacacacacacgagtgcacaagcatgcacacacacatgaaaataaaacagtcttttgttctcttttcctctttttctttcttattttggatttgattggggctttttgtatttgcttttttaaaaaaaacgtactagccgggagttggtggtgcacgcctttaatcccagcactcaggaggcagaggcaggtggatctctgtgagttcgagaccagcctggtctacaagaactagttccaggacagcctccaaagccacagagaaaccctgtctcgaaaaaccaataaataaataaataaaataaaaaaacgtactaagctgattgtgtgtgtgtgtgtgtgagagagagacagagacagagagacagagacagagagagaagagagacagaggagagagaaagagacaggagagagagagagacagagacagacagagagagagagagagagagagagagagagagagagagagagagagttcaaatgagcatttgccactcatgaaggcggaggtcagaggagggtgccggtcctcaccgtccatcttgtgtgaatatgccaggctagctggtctgctggtctccagagtgtcctgcctgtctcctgcccccctgtagggtgctagaatcgcagtgcacatggcaacactctgttctacatgggggatctgagctcaagtcttcatgcctgcatgctaagagctttactccctgagcctggcccccggctccctccctcataaaccaatctcagtatcaccggatccacattctctgccctagcgacatatagtggcaatcctagttggaggctgaggcagaaaagttgccatgatgttaagctagcctgggatgcacagagagttccgtgccagcccgggctacaatggaagatcctgtccccaaagaaacaagcaaacaaaaaacaagatggaaagttcagtggtgtgtgtgtgtgtgtgtgtgtgtgtgtgtgtgtgtgtgtgtaaggcctgggtttagtccccagcaccaaaaaagatggcttcaggaacagcaagatgcaggacattatccaggaaaaagtaagagcttgtctccctgatgtcttgagctccccactagacagtcctgacagaggccactcttgcaggtgaccttcccggcaggtaacagacctagagctgcgctcacctggctgccgtacccagacctggtccatcaggcttgagctgagccaggcatattttcaagtaaccgtttatttcactgaacaaaattaaagcttatagatgtgcattataacgtattcccaggctctgtttaatctaggagaagaaatttactaaataacacccttgtgctttagaaggactgactcaacttaactaagtgagccatttgttcggggagcagttagactctgacatcttgatgctcacgcatggaagctacctgccctgggagacaactggggatagaaagcttggacctggccaggcggtggtggcgcacgcctttaatcccagtactccagaggcagaggcagggggatctctgtgagtttgaggccagcctggtctacagagtgagttccaggacagccagggctacacagagaaaccctgtgtcaagccaaaccaaaaaaaaaaaaaaaaaaaaaaaaaaaaaaaaaaaaaaaaaaatgaaccaccctgaaccacctcctgccaccagtttaatgatggaagagagctctgacacaaaaatataaataagctaagctccaccccctgaaggttccacaacctaaacaacgccatcagctggggaccaagtttgttcacgccctgaacaggcactgtgcagggtggagaaactggagatgtgctgcccagccggtggagcagaaggttgaaatgctgctacacagaccatcgaagaaaacctaggagaaaacaaggaagagcctcctaaaagtgatcttcagaattcaaggactggtgagaccagcacaggcagacagggtggggggagctggttaacagccccagcaactgtagatagttccagaaaaacaaaccagaaatctactggattgagcaaccgaaccactctagtgactcctctgagagaacaaacagggtgggaaccagttcccgtgtcaggcatgggaaaatgtttgtcatgtgccagaaatctgaggagaagcagaagccactgtggcctctctctcaaggagagcagcgttcaggcaaactaacgggaagcctgagaaacaggaactgaaaatgtctagtcccccaaaccagacagacaagaaacatctgcagagtgatgtcactccacctccttgggtgatgtcactttgcccctcagatgctaacccagactgcattagtcggcatctatatttggacataaagggaaccaccttctctgccgtgtgccagttcagaagtatgtcattgcgagtctggtttagccctgcctaattatctcaggctatgatttcgccaacagcccccggtagtcagtctgtttaataccacacagtttgaatcccagcacattcatgctcctgtacatcatcgtcattgggctgttccctcatgaatttggaacaccctaacatcacattcacagcatatttttaaaaggcagagtggaaattccagaagtgatcatatatccaagagcttagtagatgtatcttagccatctaattttttattaggaggtaaatgttaccaaatgcaatttgttgatgaaactgatcagtgaatgacttcaacttctactacagggcagaaaaataggagagaggaagcccaccccaaggagctcatcctggagggaaaggccaagtttcaaaagacatcaattcttgtaagttgtaaggtcttaactctttgagctgtgatggtcctttcttagtttaaatcctaataaggatgctgaaagttttactcctagactccctgcaatggccagaatcacacatacagtacttgggaaagagaatgaaccagcagcatttggcaggcacctgtccctaccctgtatgtggcagatggtcagtaaagatgaaggagttgaggctgctctctcctagccattgtgctggctctgtaggcgtagatttacaaggacaacccgaaggcttaaaaaaggagtgaagctgcagaaggaaccatggacagagccaagtgttgggcgtgactagagtggtgattgcatccatgagttaagtgctcggacatttgccagccagtcttcatagacttacatagtggcatggggtcctaagtagaagccgaggactaagtgggggcaggattcggagcagtgagggtatggtgttcgatactgccgtggggctatttccccgtgagactcccccgtggaatgaattgttttggaaaggtcacaaacaccagatagctaacgttcttcagtgtccaaatagttcttgaagcattaatttagaaggaagaggagcgctggggtgggtttcgaggcagggtttctctgtggctttggaggctgtcctggacctagcttgtgtagaacaggttggtctcgaacacacagagatccacctgcctctgcctcccgagtgctgggatcaaaggcgtgcaccaccaacgcctggctgacacatttattttcaatatggccagggcttgctaggcacagctcagctccattctacttcgtgtcatcttggtttttcaattgctcctgaagatggaggggccactgtcagaaaagccaagtcatacgctattgaattggtgctagacaccgacctgtggacaggggctggcaaagctgaaggttctcccaggaggacgttccgaggctgtgtgggatttgcagagcatagctactcagttgcaagaggaaggagttagtgttgccaggagtatcaatgactggcccggaattagcactcggtcacctgttccaccctctggtggccgtcagctcatgctcatccagactcaaggtacagtgaaacgtgacagagttggcgtccatctttaatccaggcattcattatttaatcacccactccctttttagtgcactttaaattttgtgtcagactttaatgtgaggatccattcagttcccattccatccattcccatttgtggggacccattaaaagctgaataaaaactgtttttttttttttcctcttctgagttgatagctcagtcagggaggcagatgcagaaagacaatgggatggagccacacaggggggactttggggtttagagggagcacagagaacaaaggccttcccgccttagctgggggtccgggtcagcagagttcctgtctgtgtcaaatgacagggctagccagaagagagaacaggtggcagatgggacactccacggggagacactccttagcaggagcacagattgcagagatggcaccgtgcgggagggggcgaggagctggggagagactggaggacaaaataaaggtggagggaagggaaaaaaagaaaggcagggaagagagctggagtttggttttattttctttaattataaacagtggacgcctctgtcactcatctacggtaaatgccgaccctcctcttcacagggctacacaggctccccagatcacttttcacctaacaggcgctcactgtagagaaggggagcactccgggtttgtgtagctacctcttaatcctgagtcctaggattaaaggtgtgcaccaccccctcctagcttctggctgctgggattaaaggtgtgtgcctggcttccatggcttgtggctgactttgctttctgaatcctcaggcaaactttaataaatcataagtaataaatcaccatgctcatgtctccacttcctgcctgtggacacaatcagccagctgactcacaccttgctaccagctttggctgctctcactcttgctgctgtgagggactggaccctcaaatggtgagccagaatagactagtccttccttaagtcgctttagtcaggggttttgtcactgttacgagaaagtaccttgtatggagcggaagcccctcatacagtatcagctcttccctggttggtgacctttggaatcagacctgaaaacagtgatccagaaagccctgggcatccacagcgactcaccagactcagcttcccccagttactgtccatgtatttccaggaaatctgggctttggtctgagttctatgggacaacactgcagctcttggcggccttggaacctgcccgcactgcttaattcttgtcaggttgcttttgtcaggagatcaactcctctccttgttctccttctagcaggtggcgttcttctaggctgggatgctctccatcagcctatctttgagtctagccaaccacaggactcttgtatggcacgttgccttccagaggggaccaaggcccaagccaagtccaagttagcccaaggccatgaagggtttcaaaactcctgttgtttcctctccctctgtttcattttgccgtggggctcaacatctttgtgattaagtctgagttgtgccatcactacccagaatgccctgggtttattggcaattgaacacatatttatctgttctttcttctttgctcatggtctgagtattgcctgttcatacaacaaaagtttcccaagagcccaacatgtgccagacaccgttctgagtgtcgaggaaacactggtggacgaaacaggagcctgagctaagcccttccactttgtgtgatgcaagctagtgtgatgcaagctagtgggccctctgcgcagtggacataaatctgcttcctgagtttgagttttcaaggcaaaggcacccaggcattgcctccagtccatgctgctcacctccccctgtggactgtttccaagctactgtgctgacagcctgacatcaccccacaatgactgggcacagcttacaaactgcagctgataagcgagtttcagcttggagttgtctgagccaactttcctctctttaagactttaaccaggctgtgtaaggaaacacaaatacagtttctgctctaattagaacttataacaacacggatccctgctggtcaaacacacctttatttcttctgccaacagtttattgtgtttcgtttctgtcccccccccaactatgtggggtctatgcccctgaacatatgtgtaatgaactgttcagtttctctctctctctctctctctctctctctctctctctctctctctctctctctcacacacacacacacacacacacacacacactgtggggtctatgcccctgaacatatgtgtgtactgaactattcagtttctcacacacacacacacacacacagtgtggggtctatgcccctaaacatatatgtactgaactattcagtttctcacacacacacacacacacacacagtgtggggtctatgcccctgaacatatgtatagcttcttgggtgctgagatttgaggcatgcaccaccacacctttggcgacagctgttgtcctccatctcattctgtctcaagagttcccctgtggactcttacagttaaaagcaaaccaatgttgactgtcaaaagcgattactagtcaggtgtgtctgcgaatgtctgggaggtacatgtctgggaggctcgggccgggaggtgcatggctgcgatcccaacactgggcatatgaaggaaggaatcatgaatttgatgccagccagggctacacagcaagatcctttatcaaaacaaaacaaaggatagcaacaagcaaagaaaagaaggagtgttaagcagcacctagccaggagccggggtgagcagtgtcctctggccttcagatggatactgtcccacaggtcagctgaggaccagaaagtctgaggtcaggacggtgccctgtgcacacaggaatgtcccagtgatgtaagacagactaagcctggtgtcagacaggaggggagggtaactggccatgtggcatgatcagacacattcccaaaaaaggagctagatggaaaaggcccctcctgcaacggacaggcctgtggttattgtgaccatgtgaggtcagcctcacacttctactcctaccggcctgtgtctggtatcaccggaccagttacaaatccagggaggagctatcctggtcccagatgaaatccgacttctctctttccatccttgctttccccaaacattaggagtgccttctaagagcagagcactgtgttcaatactgacaggttagagccaagtaacacacacttcccttctctcagaatctgatagaaacaaagattcaaaacatgcaaatgagggagccagcaagattgcttagagggtaaaggtggttgctgccacgcctgtcaaacggtcagttcctgggactcacagggtggaaggagagaactgacttcaacttgttgccctctgacttctacatgcaaaccgcagaacacacatatgtgtaagtgtgcacatatacacaaaacaacgaatgtaatcaaaaaaagatacggagatgaggggattgacttgaggcaatcctcctgcctcagctcctgagtgctgggcccgtaggcagaagcaaccacacaggcttcagttctgtgccttcacagcagtggcggtttatgggtctgcatgattagatggcagaacagtaacattgtttcaatgtcaacttcctggttgtgatactactgcagttatgtaaaatgtgaccaccgggggaaaccggatggaaagtacagggaccattatgcactaactttgtacgtttccgaacccagtgattatttcaaaataaagtcgatcaaagtggcagaatttagtgtgtgacagccagcaggagacaggggcagcagccatttggtcccctaagtcagtctcccctgtgcttatatgctggctgctttagctttctgcctctactcacgttgtcattgacgctgtttgtacgtctccgtcattccccactagcggtcgaggcctgcagaaacactcagatttctccctagagctccagacttggatgctttagtttaattcacacactcaaccctgccaccttgatcaagtcattaagctgtgttcctgggaaatgaacacacctaccacttccgtcggcttaaagcacagctttattttgaaataatcactgggtctggaaacttacaaagttagtacagaatggtccctgtacttttcatcccattttccccgatggtcacatttcacataactgcactgtcacccccaaggatagccgttgaccacagtacttagcaatgaacaagaggagagagactgggatacgagtctctcggatacgagttctccaaaaaactctgttgtgtccaggagagggaccagtgtcattggggtgggagacgggtgacaggaaggatgtctggatgctgagataggagagaaagtttccagacataaaatgttagctggagagctaacaagcagaggaaagacggacaggcactttagcctgagggagggcgggacagagacactgacactgcggtggggagaaaggtaggatggcggtcacctgtggagttcatttccgagctgtttagtgtttccgtgtgcaaatggggaggccaggtcattagtgaccatgaaaggacagtgaagaccagcggaggcttgggtgacaccggtgagggtctgaagtggcagtggaagctgtctgcagggacatggcacgctgtggctgatgcccccggcagcctggagtgacaggggtctgcagggggcggggcattggcagctgggctccaggcagcctcccaggtcccctctgcagtggaacccagttccagcttctccaaggtctaataagcagctcagtggttcaccccaagaacgctgtctctggtccctcccccccccattattttctcatctctctcccatttactcgagtatttgggattcaaatccttgcctcaggctctgcctttgtgggaactgaacccaggacaagatctgaattgaaattggtgaccatgcacctgtctgccaaggtgttaagttggaggtgcagggggaaaccctgtagcccctgccacgagaacagtggggccaggtgttcacggtgttggcaggaggacattttcagctggcgactgtgaagtctaagatcagcaggggtggatcagagaaaggaggtgatgagtgcctgagagagtgtggagtgagctccctggatccaccattgtggagatggggctttgcacacagtatgtctgtgggtggagatggactttgcacagagtgtgtctgtgggtggagatggactttgcacagagtgtgtctgtgggtggagatggactttgcacacagtgtgtctgtgtgtggagatggactttgcacagagtgtgtctgtgggtggagatggactttgcacagagtgtgtctgtgggtggagatgggctttgcacacggtgtgtctgtgggtggagaggggctttgcacacagtgtggctgtgtcactcccctgtgtttcactgaaagtaaggaattttttaagacctgtggtggctgctgctggaaacacagcttagttggcatagtgcttgcctagggtgtagaaacccctgggttcagttccatgacatcaaacagctgtggtgccacatgcctgcagtcccagtatgtgggaggtagaggcaggagaatatagttctaggccagcttaggctacataacgagttcaagaccagcttgggatctgggatacatgagatcctgtatcagaaaagaaaggtagaggacacagtggcatgcgctggttagttttatatgtcagcttgacacaagctggagtcattggagaagggagacccatttgagaaatgactgaattgactcattgaccaggctgggaaaccatttctatatcgtagaaatgatctttataagatcaggctgtaggcaagcctgaaggcattttttaaattagtgactgatgtggcagggccccgcccattgagcttgctgaacaagccatgtggagcaagccagtaagcagcaccctccatggcctctgcatcagttcctacctcaggttcctgtcttgcttgagttcctgtcctgacttccatcagtgatggactaggaagtgtaagtctaagccaaacaaacctttttctataccagttgttttatttgtttgtttgggttttgttttttgtttttggttttcaatacaggttttctctgtagctttggagggtgtcctggaactcactttgtagaccaggctggcctcgaactcagagagatttgcctgcctctgcctcccaagtgctgggattaaaggcatgtgccaccaccatgtagtgacatcttgttcctccagtggactcgcagtggtggccacatcttaagggtgtggcttcaggtgtgcagacagcttccttataaggaagctcactttcttgggcagcagtcggaactctgggagggcagattgcaccttcaggagcaggaagaccgcagcggttatttattattaattgtgtaagtgcttccctgataaatacctgttaatcatttatcttgggtcttatggactcatttaaaccctgccttcaccgccacccgattaccagctgtttttggatatggtgtttatcatagaagcagtaaccctaagataggaagaaagaaggaaggaagggagaaaaggaagaaaaaagaaaaggaggggaaattcccgaggctggaatagactggcttgtcacaatctgtcaccctggatgctggtaggtagccaggtgccatcaagttcatgcatgactataccacccctatggtttaatcctactggatcgccagattgttttttttcccccctaggattttctaaagaagagagatgtaagattttagaaaagaaagcagttgtatgtggtcagggttccttcctggaacagaaggtgggtttacagagaaaattagtgagcagctggagagaagcagagatcccaagggcaaagaggggcctggcagacttccattcctggctcccattgttttctgagccccagcagaccccaagtcccccagcatttagttaattatctctgtgctagttattttttctcattgttgagacaaacgacctgacaaaacaattgaggagaagaagggctgatttcgactgatggactgaaagtccgttatggcgaggaaggcatggtggagttgatggtggcaggagggtggctgtgcttgccacatcttggaggatcaggaggtagctgagactaggtgcatgccagctttgagccttccacttccccagccagccccatctcctaagggacccacagcctgcctagcagcgccttcagctggagactgagtggggacatttcacatttaatcagtgacaacttccacattgggttttgtgagccagcagcctctatcaccactctgctgattctgtttctgttactttaccaccaacagctctgcctgaatgggcgaagctgtccgtgtactttccctttctgggtggactccacggaagctgactgtgactgtcactccatgtaggtgtgtggtcatttgtcatttagatggttggagaggatttatgacctgctagtggtttacagtaaagggaacaccaggaaacaagggcagaaatactgtctgctcatagcattgttgacttcctgagagaactgcttgacgcctgataaggaatttccttgttttaagggtattgttttgttttgagcagcagcattctattatacagtgtagaattcttttttttttaagtgagacattttatgggagagagagagagagagagagagagagagagagagagagagaggatagaagagaagagggagacaggaaaagtcctgtctgcccccaagggaacagtgggaaatagctatcgtagaattcttgagacggcttcctttctgtacacacatgagcaagttagacagtgatagacaccaaataggcagtcgataaacaggtgtgtgaagagagctggacgccgctgaggctttgtccaccatgtcacatgccaacatgtcacatgaccaatgtgctttggaatctctttattctgtcaccactgagcaatacctactgagaggcactctgtggaagcggcaggttagacaagagttccttacaaagtgcatataacccccaaaagattaatacccgacaattaggatacatttgtcaaccaagagaatgaggtttcccggaactgtgaagggagcagagactaacactagagggggagcccaccgttatccatggcgaagggtgacgataccaagctcaggtcacccttttctaatgacagctttctgacaaggggacaggtctctgtttgcatgcgcatacataggacccttgaacccatatctgacccttccaaactgaggttctgtttgtgataacagccttatgtatcccaggctggccctagatcttgctacgtagctgaggataaccatgagagatgggtgtggtggtttgaatgaaagaacaagcttaaaacaagagggggggagggaggaaggaagaaaagaaagaagaaagaccaacagacagaaagaaagaaagaaagaaagaagcaaaggggacctgtgagatggctcagctggcaaggttgctcactgccaaccctggtgactaagctccatcccagctcccacatggtagaaggaggggactgacatttgcaaattgtcctctgacctccacacatgcctgtggggtcaatgcacattgacacacatgaaaaacaattgtttttttttttttaatttaaaaagaaagacagaccgtgaatattttgactgataagtccacatgaaaagcttctgacctcactaaaagtgaagacggacaggcaggccttttttggaaaggcctgatagtgtcttcagctttgtagatctcactgagcaaaggcagccccgggcagtacataagagatgagtgtgattgctccggtaaaaacagagagaaagctggccagatgctcagcaggtgagagtgtgtgctgaggacccaggtcaggtgactcacagctgctgtcactccagctctgtgggattgggtgcctgcctctgacttctgacagacacagatgcaaacaccagcacacagaaaagatacagaccaacgttttgaaattttatttgaattttgaaaagtgctaagtgggaaaagtgtacagaattggataatgagtttggtatggatttctgagagcagtggatcctctctcagcttagggaggctcaacctgttgggggcggggcagtcaacactcactcccctcagcttgagtcagcggctcttaagtgcattgtcctgtgttgattgtgaataaagacatgggcaaatgagtgaaaagttggtttgttaagtactgagaaaggctctcaagaacgccagggatcccaagagagaaaaccatcagtctgcataggggatttttataggaattatggcagaagctggacaagaactaaggccatttctattgacattggttaatttcggagcaagctaatggggctcacagaccaagctaatgggggctctcacactctgggcgtgtcctccagacctagctgggttgctggtcacacactgcccacagatcaggacactggtcaggaatccgttactcctgttcattcttttttgacccgggcttggcttgccagcagactttggctatactgctgtgtattaattacacgtgctctccctggcctcatgtttctgtacctgtagctcactacgaccctgtccttctgtacacaggaagttaactcctgccacaactgccaagatgcagctgtagctttctttggttaccttatagctagcttctcgcctttggttacctatagctagcttcctagaagaggaggaagcttcttataatctgtctttgcccacaagtctgtctgtcatgattagatacaagggctgtgaacgacacccctgcttggcagatgttcctgggttgggggcttttacaggagccagctggaacctgtggagacccgcccctcttgcctgatcagcgtaagttctcatgtttaccatccacactgttcctgctctcattattttaagcctaacgttcccttgaaggctaacatttgctttactgtgatggattggttttcataattttaatagtatatctatttgttggatttcatgggggaggattgcttgtttgggggggcaggatctcatacagcccaggctgggtttgaactcatgtcccttctacctcttactttgaagaactggtgttatatatgtaaagaactctacccagctatccatcttttttataagatatttcatttacttttaaaagactaaagagaaagtaaagtgcggccagtgcaggcagaggagtgaaatgtcatggagtggcacgagccttaactccagcgcttgggaggcagaggcagggggatctctgtgagtccaaggccagcctggtctacagagtgagtaaataagcaaaataaaacagtgcaaagctgttcatgacaaatctatgaaaaggccattcagagagacacatagtaggtgttcactcgagttcttaaagaagatttatctttatatgtgtgtgcaaatgttttgcccgcatgtatgtttgtacatcatgtgtgtgcctgatgcccatagaggtcagaagagggatcagatctcctataactggagctgcaggtggttataaactgtggagggggcgccgagaaccgcactcggatcctctggaagagcagcaagtgctcttaactgttacccatctctgaggcctggcatccacattcttacaagtttatatgtgccttgaaacatctttccaagtaacccccaactggcatcggcagccacatgttaggtaaggactgaaagcgctattagttacctggtgtcatataaggacccccctaaaatgtgtccctagagcaataatgatcacttaaaaatttcctcgattaaccctttgagcaatctgggagcagctcaggtgggtggtgctggctggagcagtggtgagctcacctgtggctggggctgaagggaccacaccatgtgttcatttaaacttctggcggtggcctgcggtggtttgagcaggtgggcctgtacatgactctccttgttgctgtgaagaaaccattttggctcacagtttcagaggatgcagccaccaccatggctgtgtcagcaggagtgtgaggctgctcacacatggaaactaacaggaagtggggttgggatctggaagttcacccccagtgacctgcttcctccagtgaggctccaccttgaaaaggtctcacggcttccaaacacagcactgtcaactggagaccaagcattcaaacacaggaacctgtgagggacattttacctcctcaccatgacagtcctccactggtctctgcatggtcattggacttctgacatggcatctgggattccagagagttggagtaacaggtccagagagacaaggccaagctgcagccagcttgcctttaataaagccacgtctgccacaatacttacaaaagtctcctgagccctccctggtgcagggtcaaaattcccattattggagactgtgcgtaagagagaatacattgacagaaactttctggaaaaatattatccactacagcatattctattcaattttgtatcatttcaaccttaatggtgaacgccttatttcagaatgagcaacgccaatgtgaaattacttcaacttaaaattctattaaaaaaaaaagaaatgaagtatttctcttatcccaccaacacgaagaaacaaaacacacattacaccctgtacatgttgtgatacagtgtttgtagtaggaagcagttctatggaaagcagaggcgattacacaccctataattatcaccgagtgatctattttaacagcgtctcaccaaagcagcaccacatgacttgatttaaaatttgatttaaaattaaatagcctctgcagtagtggttttcccagaaccatttggagctatttaaaattctgaagtcaagtaaccctggagacgcgcttgctctccattctagaattaagagtaactcagaggttctaacaggattcctaacgtgtggaaaaacccactgcttcctaccaaaaagtctgccctcccaaagactctagacaaccaagatccaaaacaaacgggataggaaaaagggtaagtggttgagacccttgggtaagaatcaagaattccaggccagctaatatttgctgtagaagttgccttgtagagatggcatgccttcatagacagatatttccaaataagcatctaaaaaccacagtgaaccatgcttaaggcccaagtgacatgaccctggagtgtatgtggctttactcctttcccaaatgtgaaactgcaattctgtgactctcacaaacagtagataagctttggtttacagtgaaaaccccccacttttctgtgtactgtagactagggttccacctcggcggctgtagcttcatccaaggactcattaggaaccatctgtgctctctcactcaagtcccttagaataaagccctttgagatgtcagaacctaccaaaagacacacaaaaattgtaaagatacataaacacaactctcttatttgagtgtgtgtgtgtgtacacacgtgtgcgcacatgcaagtttgccatagcacatgttgtgaggtcagagaacagtttgcgggagtaagctctctcttttcaccatgtgggccccagagatcacactcagggcatcaggcttgggagcaagcacccttactcactgagccatctcaccagcccacaatgctctgtgcttttaaaaagttatttatgtctttatctgtttgtttgtttattggggagtgcacacatgtgcaggtgtggaattcagatgacaacttgcaggagttggttctctccttctttcttgtaggttttaggattgaacttgggtcttcagatgctaagacaagcatttttacccactgagccatcacagtgaccacacccaggactctcctgaaaagccaggcccaggcccatgcacacacccacacttggttatgccttatcctctgcctgtatcttgctattaatcatgtggtgaaacctatgtaaaatctcttcctcgttggggctgaggagatggctcatcagatagaccatgtactgttcttgcagaagaactgagtttggttttcaggacccacgccaggtggctcatacccacctgcaactccagctccagggatcatctgaaaccctcttcatgcctcggtgggaaattctcctccgtggacaagcaaaactcctggtgtcaccaagtgagatctctggaaatcctcagggtaccgcaggccactgtggtgctgagtttttcagcctacttcccaccgatgctgacactggaaccttaaagtttctacttttcaaactaaaacggatttttttactttcagcttcacttaggtatttatctcttacgcaaagggacttctagccctggatatggagattctgagccacaggtgcaacccttatctgccttattgatgattaagacccactctgttggtgataatgactaattattttgctttcttgctaaatcactctgcctattattccaagaaggaaattcccacgccttgtcaacagtctcctccttttcattttagtggaacggatgaatcatagtatttaaaaaaactttaaatacctcatgttcgactattggtgatttgttggtgttccatgtggtatactgactccctcacaatgggtgataaagtatctggctttcctatgtcttcccccatttcctccctttcatacaatgacatcaccatttgagttccttgtttgtttccttaaaattaactacaaaaccacagtgctaagtgctgcaagggaattgagatcgaaaccagaggatgagaccagagatttagagttacctgcagagtgtagttaggaccccattgtcattgtcacctgttttgagctaaatgcttctctctgtaactgtccctcaggggaaacttcaaatacacaacgctccctattatgctgctaaaatgaagtgtgtggcattgtaaatgaggccacgtgggctggagagatggctcagaggttaagagcactgacttgctcttccagaggttctgagttcaattcccagcaaccacatggtggctcacaaccatctactatgagatctggtgccctctgctggtgtgcagatatacatggaagcagaatgttgtatacataataaataaaatctttaaaaataaataagtaaatgaggccacgtgggaggagatggctgctctaagggggaaaaaaagcttgctaatgagggatggggaagggtcctaggttagaagccgataagggctgcaaagaggactcagcagtcggagcacttgctgcactctgcaggctgctcttgcagaggacccaggtttggttcccagcacctacatggtggctcacaaacacgtgtaactgcaattctagggcatctgatgccttctcagtggacatacaaacaagaaggcagcagacacatacatattttttttaagcaccagaaagaataaaataaatatactttttctccccctttccttttattttttgacactgggtttctctgtgtaacagtcttagctgtactgaactctctgtaaaccaagctgacctccaactcactgagatctgcctgcctctgctccccaagtgctgggattaaaggcctaggtcaccactgcccagcccagaataaatattttttttaaatgatagacaaagagattaacactgaagccagcctgagtaagccagcaaaaccctgtctcaaaaccaaaacaaaacagcaacaaaaaactcaacaacaaagggggctggagagatggtccagtaattaaacgtgcttcctactctgccaggaccagaatttggttcctagcttccacttaaggcagctcacagtcagctataactcctgctccagggcatcctatgtcgtcttctggccttcgagaggatattcacccatatgctatatactcaccagagatacacttatgcatacataaaactaattaaaaaacaaaaaattaaataatggtaaataaaaagcaaacccaaattaaaagcaatagcaaaacaaaatgaaaacaagaccaatcaaaacgtctggaaaccctgaaggcagaagcagggactgcctaccctctgctcaactttgagtgagaacttccgtattgttggtcatagcaatacatcttgtcttatgaaagtattatagctatttgcttaacaaacaaaaatgctgggctctccactaagtatgcatgccaaacaaacaacgaacacttcagtctcagcattcccgagcagtatgctacctggggtccctgaaaaatatagttaccccactcctttatagatggggacaatcaaggatgtggtgttttggatgagaatgccggctaactgccagcttatagactgttgggggaagattagcaggtgtggccttgttagaggagctgtgtcaactggaggtgggcttcggggtttctgaggcccacaacagttccagagttgcactttctgcctgtgggtcaggttggacatctctcagctcctgctcaaccaccgtgcttgtctggttcctgctgcgatgctcatggaccagccctctgaaaccagtcaagctcccagttaaatattttcctttataagagttgcagaggtcatggtgtttcttcacagcaacagaacagtggctgttgtggaacaaaacctttcctggggagatacttgacatatatacctactcatcccaggtatggggcccacaacaggccaaagaacagatactacctaagttcaacttggcaaaccaatgaattgtattggggttaattacggaatatggatgaggagttacctacagcagaaatgactcaagacagttgcatcatcaaagctcactcccagcagagtgacagattacaaaacctgggaaatccggagcacactgcacagcctgcaggcagctcagtaggttggagagtgtcctttccaagtgattcggttggtccaaacctcttccaggcagcctggctggtttctgcttctagatctgccttctaagtcttctttgcagcttggcttgtctgagttttctctacagcttagctgtctgaatgtgactcttagcagctttatcacttactttgggagggaggggtctaatgaatctggtcagtttcagggacttcctgaagctttttgagttgctcattttctgattaaggagcttcctgcaggatggaatgtttcaatctcagaggaaactgttacacagtagtgactaagacagcagagccttctagtattgtcttaggaaattgtctccccaggcagatttgcacaagttgtcttctcttcccactcctgtctgcctggcatgctaacatggtgtggctgtctggtgatcctggggcaaccttgtgaacagaccctgtgtggtgggcaggacggaagacagagtggagactagtgactaccgccggcatcacagtgtaactgtgctgcctagacttaccttactggagaggaaacacatttctaacttgtggaggccagttatttgagcttatatttcaagtctttgcaacccaaatagtccaagtgtcattagaaaaggtcagaacccctcccttgtcaaaatctaccatcctcatttgaatggtgtaggaaaagtgatggctattctggttgacttgactgcatctggaattaactaaaacccaagtggctaggcacgtctgtaagggacttttttcttaattaaaatcctttgaagcagggagacccacatttaatcaggatcttctgaggtgggacatgtatcttcaatccctatcttttgaggtggaaagagcaaactgtagtcggggccacaccttccagtagcctgtgggaaggagaggaaagatggaagcttgctctctggctgcttgcttttgctgttgtcatcaagtccaactactggattcttggaccttcgtctgttattattttccttgctacttcataattgtaattttgctactgtttatgaattgtaaggtaaatatctgtgttttctgatgatcttaggtgacgcctgtgaaacggccattctacccccaaaggggtcatgacccacaggtagagaactactgctgtaagctttattcctttagagaactctaaaacagcaagctatccgcaaagggcagggtagcagaccctcagccatagactgcacagaggtctagaaacagagtctagccaggaggtcttgtggagaatggagatcaggtcatgaagtaagatggacactgaacaatcttgagtaacatacttgagtctgttgtcatatgtggaccgggcctggcttgagaaacgggtgtcgtctgtttctaaccctgaaccatgctgcctcgttgctaacagctggtcacaaacttggatggcgctgagacaaaagttttacatctacagtgaaaagagacaaaaacttgaaaactccagggtatagttgaggtattagtcacttcttttcactgggatcaagtatctggtaggcaacagcttgagggaggtagtatttattttggcttgtggtttgaggggatgccgtccatcacggggagggcgtggtggtccatgcccatcacggggagggcatggtggtccatgcccaccacggggagggcttggtggtccatgtcttcttggggagggcgtggtggtccatgcccatcacagggagggcgtggtggtccatgtcttcttggggagggcatggtggtccatgcccatctcggggagggcgtggtggtccatgtcttcacggggagggcgtggtggtccatgcccaccacggggagggcgtggtggtccatgtcttcatggggagggcatagggtccatgtctgctgcagcaagtatgtttttcctcttctttcttcttcctccatgtctatttcatttcaacaccctaagacacatcttttttatttgttttaagacagggtttctctgtgtagcactgactgtcctagaactcactctgtagaccaggctggccttgaactctgagatctgccttcctctgcacctcaagtgatgggattagtatgtgccactaccacctggcccaagacacatcttaatgtcccacagggatccatccattgctttgttggtgacaactcttcagttcctctctccccttcccgtggaccttcctaatctattctctcccttcgattcttagttcaaaaaaaccaacactggatgttaccctgcttccaacccccccttccctgttgttctctcttcacacttggttttctccagaagattccacagtggttcttggcttcagttgttctactttctttctttcttttctttcctttcctttccttttctttctttctttctttctttttgtttttttttttgtttgtttgtcttttgtttttcgagacagggtttctctgtgtagctttggagcctgtcctggcactcgctctggagaccaggctgtccttgaactcacagagatccgcctgcctctgcctcccgagtgctgggattaaaggcgtgtgccaccaacgcctggcgtcagttgttctactttcaaccaagctcctcaggggaattagtcaaccagcagcctaggcctaaatcatacccgggaaacccaccaggaacacagtgttgaggagcctagatttactccatgagtttcattgtatacgtggagagactgaaattagcccgtctcactttagcatctgtagctattttgaatccaagttaaacagaggatcagcctggggactttcgatacaagtcgtcaccgtgcaagtttagaagtaaaggctgaggctgagctggtgtttggtatcaagagaaagaaacctggagaggtggatgtcacctgacctttccaagagagctaggacaatggctgaccaaaccagtagcacatttacttggggtatttataggaacacaggcaactgacaggcagttatcccacccaggagagcacttgctccccagcagcttctgactggttggggggcagaggggtctcatgcacctgtttgccttccaggagagcccatcaggggacggtgtgagggcctcttctcttttcatattatttactatttatggtgtgtgcttatgcccacaggacagcttccaggagtcagttctcacctcctaccttgttgaggtggggtctcttgggtctgccctgtgctggctgagtaccccaggctaccccaaccccttgagcttccggatgactttcttgtctctgcctctcatctcagggtaggtgtgctcctacatctggctttttacctgatgccggggggatcaaattcaagagtcttgcctgggtagctaatacccctacctgctgagtcatgtctttggccttgtaagggcctcttgcagggaccacattggttttgctttgaagatgacaaagagttccacagcagtaaatcgtcttggagaaggctttgtgctgatggggaacttggctttaaggtgattggcatcagtgtgactcagcgtcagccagctgaaagagaaatgggactggaggacagggttaacggtagaaataaaagaatgttgagtcagttttgctttttttcttcttcttcttcttctgaagtttgcatttctctagaagtccttggcatcattaaagtttgctttgacttctgaggatctggctcactgattcctagatactaaactgggagagaacaatgatccaaccctctctcccgaggctggataacggagcagctctgtggctgatgcaaagacttaattggcactctccagggaagtctgaaacacactgagctagcaccccagggctccagtgatctcaccaccctgttcctgctggtacatagctgacagctcctgtaggtgcaatattaccagtgctctggagaaaatctccctcctcttgcaacagtgaaatccagtcagtctccatagacatagttaacagcaatgaaaacccaagctgatagtctagttgtctctttcagtgcaggagaggtgcctggctgctggctgggtctctggcctatgctcagagcctggagctgactggttaattctaagtcagtcaagtacatataaatgacatttaaaaacaggatatgtcacctaatggagaatacatttgtgtcttagctaattgaagaaaactagtgaataatgttatcctaatcgttttttaaagtctaaccaatgtttttattttattttattttaggtctagtcagtgtttgttctttacttgtagtgaagactttccaccatagctgcaccctcagaaagagaagaaagttggttgatttagaactgccagtgaggaattttattaaccttttccgataatgtttttaaggtttttttgttttgttttgttttgttttgtttttatgtgtatgggtattttgtctccgtgtttgtgcaccatgtgtgactggcgccctttgaggacagaggatcccctggaacttgatcatgggctgccatgtgggtgctgggaattgaacccaggtcctctggaagagcagccagtgctctaaccacttggttatcttgtagaaagtaaagaaaaggacaagaatgaattaagttaacattagaagggtgtctcttcaaactttttgttctgaggtagggccctactctgtagccacactggcctcttggactcacaccaatcctcctgcctcagcctcttgaacacagtgattacagatgtgagacatcacagattgttctcaatattttataatatccacacattgtttgatgggtgttggtggcacacgcctttaatcccagcactcgggaggcagaggcaggcagatctctgtgagtttgaagccagccctgagcaagttctagctcaccctccaaagccaaagagaaaccctgtcttgaaaaaacaaaaaaagaaacaaacaaaaactccacatgtgttttatgtaactgtaatacaggtaatgaataagacatgtacaaaaggttatatgtatgtgtgtgtgtgtgtatcaatggggccgtgctcaatacactgttgttatggccaagatatcttgaatcagtgaggaatggtggtgcaaacctttaaccacagcactcagaaggcagagggcagaggcagggggatttctgtgagctctgtctggtctacacagccagttccaagtgtctcagtttgacaatgatatttcgataaacacggctctttccttctaacattctttttgaggtcttatgtagactaggctggtctccagcttgctatgtagtagagcagtggttctcaaccttcccaatgctgtgatcctttaatacagttcctcatgttctggtgacccccaaccataaaattattttcattgctacttcacaactgcaattttgctattgttacgaattgtaatgtaaataccgaatatgcaggatatctgcgagacaacccctgtgaagggttcggtcaactgccaagggttgagaaccacggtagtagaggatgacctcaaacctctgaccttcctgcctctacctcttggctactgcactttcacctactaagacatcttactcaatcagcccacaagcggatatttttagatgtgctaatgatattttagctaatatcttctatataaaatagttttcccaactaataaacatcttaaattccacggtctatctttaattaccgttactctgcttttcaaaagtgttacatggctcttatactattattccatttggctaacccccaccctttgggtttctctgtgcatagattttcacttgtatatttggtgttcctggggaggaatgaacacatgtctcctgtgtctccagatagggaattgatgagacaacaaagttagtgtacccctaaagtctaacttggtggatggatgtgtttattgagtttacttacttacaggaacagaagggactcaaggacagctgcatcaataaagtccttcccggcatgggaggtggctcacaaaaactgaaaccctggtgctcaccgggtgacttgaaggcagctctacaggctggagattgccttataggaagctttggttgtctgcacctgtcccaggcagcttgatgggcttctgtttcctcagcagtctttttgcttatataatcttggaaacagggatggcccttgtgtgtctggtcagtttcaggatcttcctaagactcttacatggttaacttcctatgctggatagtttttatgccaacttgacacaagctagagtatttggagaggaaggagctgcctcagttgaggatctagctataggcaaacctgcaggacatctttttaattatgattgatgtgggagggcccagctcatggcgggtgatgctatccctgggacattggtcctgggttccataaaaactcgggctgagcaagccacggggagcaagccaatacacagcacccttccatggtctgtgcatcagctcctgcctccaggtccctgccctctttgagttcctgtcctgacttccttcagggatgaacagtgctgtagaagtgtaaatcaaaccctttcctccctaagttgctgatcatggtgtttcatagctgctcaggtctgcaagcagagcccggtgtcttcatgtctttacagcggcaggtggtgtatcctaaatattagtgagttggggagaagttgctacaaaacactaacccacaaactgaaagcagccactaggaaagtggccgtgtgattccgactccatgagaaagcgggggaggcaaaatggtggtgacaacaaagacagtggtgaattacaggaggggggcaaccaggcaagcacggagggggtgggagcactgctgggagcactgctgtgtatgctctacagtggtgcagacacgagtcattatgcaccttccaaaccctctgagggcccgccaccaacactgaagcctaatggagactggactgtgagtcatcagttggagtagttcaggtcatcactggtaacaaacgtgtcacaatgggatgggggaacccagggaaggtgggaactattgaaaaccctcgacaggcatggtggcgcactcctctaatcccagcactgggaagctgtggtacattaggagtggttggtcacactgcttccaaaggaaggagagaaggataaattctattctcgccttacctcctctctctccagtccaggaccccagctcacaggagtggtgatgtctgtccttaagttgaatctgcccttatttaaccgagacactcctaggtgattctagacgctgtcaggttaacaccccaattgtaaccaccacagagggcttttaccaggcaagggtacaggggtgatgaatccagtgcctgacggtggcaggaagacactttatcgttgagtcacactctcatcctttatggttggtaaagaaggctttgccagctacagactcagtggtttctgcagctttcccatgcaaacacacgtggtgagtggtgcaggcgggaccctttctctataaagtgaagcctgaaagccccaaaagctttcctcttagagaccacacttcccacccaaggcagactgtccatggagcagaaaccctcttcatgcagtggggcgagtcccaactggaacacacattctttccgctccaatgaggaggctgccctatgagagccaggcagccaggggctggtggggtgatgcaaggtatcccagggcaaccactcctccccaaagcagtcgaccctgcccctctgtgagccatttcctggctgttcaaacagctccacccaagccccaaatctatcttggttctgagacatcctttgggatttgagttcactgtgtggccagaaggtctggaacaaaaatatatggtccctggggtgtgactccatggcagtcccagaaagagcatgggttattttaatctggtaataaatagtccaggtctgtgccaagcatgaaacagtctcttgtctatcctgtctaaatgtgtgagcaagcacagacatcctaagatggaggggaccttaagggttgggttcttggacagattgggagtgtgcctgtctgagttccccatttgaaatgccctctcatctccttgtggaagctctttcctcccctggcaagccggccccacacatctcatctccctaactttcatttgcccaccatgatccggtatggaaaagatttgattaattcgaacaggtttggaataaatgagagctgaagtcttcctgggaaagaggatgacgagaaaaagtgtgggacaaagacatttatgaaacatttatatttagaacagaaacagaaaatttggagaagaaaacatacagttaaggcagagggtccagctggatgagcactcagagacaatggacccctgaaatctgcaggcggttgatggttggtgggtgtggagtagagggcggttcctcagcgtgggagctgctcactagcttctccatgcttctgcaagttgccctaactaaaccatgggttcaccgggctagctgagcagagtcctgtctttggtctgttgttggcatcctgtctgtttgcctccccaggaggagtttacacaatgcttgcatatctgaaaatagccctcttcctaattgatagcaaaactagacatagaattctaagctgcaactcacttccttctgagtgatgacaaccttgtcactgaggaggactcaggagcacctttgacggtggcactcatgatcacgccacaagtttgtttgcatgcaactgtatgtgtgtgcatctttacataattaaaaaatgcagcataaacaaatgaaacacacctttacacagttcgggtaatattccacagcataaacaaatgtaacacgtttccctagttaattattccacagaaggctgctcttccagaagacctaggttcaggtcccagcacctactgggtagctcacaactgcctttaatttcatttacaggacgccctcttctggctcccatgggcactgcacacacatggcgcacataaactcactcaggtttacacacatacgcattaacttcaaaaaaatcctaaaaataaaaccaaagacttcactgacagacactaaagctttttccagggcaaaattggtgatatttgaggtagactcaattagtactgtttaaatgaaatattttatgatgtttttatatttaaatactgtcgtgtgtgtgtgtgtgtgtgtgtgtgtgtgtgtgtgtgtgtgtcacacaaatgcactcacacacacacatggactcacacaccacacacacatgctgtccccagcccttcttgtgtatgtttctatttgctaattggcacactcttgcctcagagggaaatgtaggtgggaagtcctttgggaaatgtacttggtaaggaagaggatttctgtggttttataagttacctgtttccataacccttgcagcactcagccctgctgagacatactcccagtagaccagataaacatttctgttcatcaaggtacctttgtcccaaacacattatggtatacagcttaatgcttaaagctcagcctcctacagtctgttaatgtccacatggctcccctcagagtagttcacagtggcgtcagcatgtagggtagctcacactggcgtcagcatgtagggtagttcagtggctgcctattgctgttatgcgaagccaaactttgaccttcttcagagaacctgtggggtctaaccaaggaggaggaagagaaggaagaggagtcattttcagtttgagagctttggatcactcttccaggaaaccaagtcagcataaaatgcagacggttaccctttgaaggcaactgtaggagaaactgaggccagcctacccaagccgcagtccccctgcccaggtgcccaggccagcctgcatgagcatgcgtggcaagcacttcctcctaaaccaagcctaccatggtgtccagagactgctgacgaagagacacctgaccagagtcaccagtgaggaaaggaccgcgcagcagagtcagcgcctgagcagatgggaccttgggagggggtgtaaaggcagaactaacttctaacttagtaaacttctaacttagtaaacttctaacttagtaaacaggtctgcagccggctctgcactcaccgactcccagctcctgggtccttggtgctgtcttctcacccctaccccaaggggtgtcctagcagggtgactcacaacaggcaacaaccctttggagacaaatactcctcaggggttagagactgtagcagagtgtgaggtaggccctgggctctttgctctccatctttagttttaggaaaacactcagcacaaagccatcattgacactgtaaccacccatccagaaccttctacaagacttcatagttagagatttcccacatagccgtgtcccagcctgagcccctgaaagagggactaggcgcatgcctgtgaagtgaggtcatgtgtaacttcccatcttaatctcagacagtcacaagattgtgcaaagaagcaaaaccatcaaaacatgaggatgattgatgggacgtccttctgtatatacgtttctcttattggtggatgaattaaacactgtggctctatgctcactctcaggatgcacacgctaatcacatgtgtgtgcagggctcagtgttccgctctatgctcactctcaggatgcacacgctaatcacatgtgtgtgcaggacacagtgtgtggctctatgctcactctcaggatgcacacgctaatcacaggtgtgcagggcacagtgttccgctctatgctcactctcaggatgcacacactaatcacaggtgtgcgcagggctcacgtccacatctcaccaggcccctcccaggctgcggcggaaccagttctaaccagaaacggccccgggaccagggcgccggacagccgagaagcaacacaagcgccgaggccgccggaccagccagcacctccctggcgacggtgggcggggcgggactggcgttgacgccagaagaccacttccgcctggtgcgtatgacgtcaggcccgacccccttaaaagcccaggaggcaagcctcgcgagattccgggggctgnnnnnnnnnnnnnnnnnnnnnnnnnnnnnnnnnnnnnnnnnnnnnnnnnnntaaaccgggcaggtcttcttcaagtccagatctgctgctcacgaggctggcgcttgcacctcaagttgtctcgatgtctgcactcgcgcgcgcgcacacacacacatgctacacacaccacacacaaatgcactcacagacacatgcactcacacaccacacacacatgctacacacaccacacacacatgcactcacacaccacacacacatgcactcacagacacatgcactcacacactacacacaggctacacacaccacacacacatgctatacacgccacacatgcactcacacgccacacacacatgcactcatagacacatgcactcacacacgccacacacacatgctacacacacacacacacacaccacacacaaatgcactcacacacacacatggactcacacaccacacacacatgctacacacaccacacacacatgcactcacacaccacacacacatgctacacacaccacacacacatgcactcacacaccacacactcatgctacacacaccacacacaatgctacacacaccacacacacatgtactcacacaccacacactcatgctacacacaccacacacacatgtactcacacaccacacacacacacacacacacacatacattttctcttatgccccaggatatataaacaattgagtttattatactcttcccctgtggtggcctcttggagttgtgtctgagttagctgcccctgtgtctttacttggggagggaaattagttcaagatagggaagattgtgacatttattgtataagctcctagacgtacttttgtttgcaataccctgatcccaacagaagtacagtggatgaaagtctggggtgtgacctcactctgcccggtgctcttctcttgtgagaggactgagtaggtttctcatttgctggatgtgcttagactgagaagcaaattgggtcctttttgtgctcttctgaaaggccctgctgttaaggaatgaaacaaattagactcagaaaagccacatgaagtacaatactgtaagtccccgcatttatttttggagtttgcttaaaagtaagtcaaagaatagaaaccacgattgtgcaaataaagtgtgccctctgcagatttttaaaaattacttaaagcagtttttttcttttagtttaaatatattttggttgtattcttcccttccccaatcccttccagatcagctcttcctccttactcaaccagctttaagttctttctcaaaaaaaaaaaaaaaaacaaaacaaaaaaccctgaagtttttttaatgctagattttaatttcaaaaggtggaacattatagaaaaggagaaagcattagtctcagtttggcccttcttttctttagaaatgttctgctccctcaaataccagaagtatcttgttggtaaggttgggaacttgcagagtgccttctgacagctgggaaaaggcggagactccaaaccaggatttgcatcttgctgtaatatgaaatcagtttgttttatgtaagtaaatgcagggccagttaagcaagcacgttgctgcttgagaatcctagcattgcagtcaaatcaacagatggtcaagttatgactgggttagatttgacatttgcaggaagcctgcccctggattttgatgaagagcaccatgggctgtttcagtgagatggtgaagacaagcttgaggtagaaggattttatttaaaccaaaccaaacaaacagaagcccccccccccaaacctaaaacaaccaaaaaacccccaatcgtctgtctcctgactttcttccttgttcctccaaccgttggagtgttatcatacactgggtacatgggactgtctccaggtaaaggctgggaggatgttattgtttacaagctttggaaggaggggataagaggaagagagttggttgcctattatacacagatgctgctggggcctgtcctgaggtgggtggagtctcctggagagaaataggaccccacctccagtaaccagagtataaaactcatgccgaagccaaggaaggagggattcaaccagggtttcaggaggaaaagacatttgtgaaggtgatttgggtgaccagattgatcattcatcggagggtaagacagtaagaggacactttatgcaggactacttgctgccaaaacattgttttctttctggagtgtttttgttactcccccccccccatgaagtaaatgaggtgccaaggccaggtaggcaggaagtggtggggtctccttggcctgggcacctaccgttccccactgccattcaggaaggtcttgctcaggtctgcagttgcgaagagtggattttggaaaatgcatctaaattttgagattggttttctgaagaactaggtaaatgagttgtgtttgttgtttgttttgtggtctgtttggttttgagacagggtctcactctgtagctgtgtagttccaggctgtcctgtttagaccaggctggctctaactcacaaagatccacttttctgtctgccgtgctaggattaaaggtgtgtgccactgcactctgcaagtgagttatttttggcatgtaaaatattttagtctacttttggaagttgcttttggtgctaattagttgtaaccattgagtgagacttgataattttgaattactgcctgtcagcacccatgtggattgaaaaggagaaattagaagtacactaaccctttccccagtgcaatatttcaattgttgtgtattttgtcttgtgtttttaaaggttgcttggcattaaatattgtttgggttgaattatgaagttggaattgagttgatgatgtcagtctcatccctttcagtttttatttccataaatagctgttctgatgatgtctgaaataaggctttgagttcagttttgtacatgtgtaaaatgagagaagttcagccatggaaactcggcatttgggtgtcatctgagatctctgggaccgtgaagtcacaggtgttacggtaggcactgtgctccatacaggtgtgctggagaaataaacaggtgttggaagaatagtgtgtctggttttatttatggattttcgggcttaatgtttgtttctggttaacagtaaattcagttaaacttatgtggtgtgtatgagtgagcagtggtgggctctgtctatgttacccaaaggtccagtgaaatccaggctccccaccgtcattcttgctcaggttgtctctccttgttacagagaggtccaggggccagtccgtggtccagtgtagaaagtactgttctctgaatgggatcggttctgggatgcccatctccaggccagcagtttatggttcatgagcttaactcgggggaaggagtagagccgtcaacacttaaagcccatgaaatacgacaaagataggaaaaataagctgttagcatgacttcaatcaccgtttccgtttgccatcctgctggcgcttactaattccacaggtgcagtgtttacctaactacatgtctgatcactcgtgtgcaggtagcattccctcgaggtcttgcccttttcagccgtttgtacctttgacagcaattaaacccaaaatttcatagagttgcttttaagtctgcctcaatggtttgggttcaagggtttacagggatggctaagtacaggtttggttttgaaagggttcttaggataaaggggcatcagttctccctttaaagggaaagttggctctcttctgggggatacaagctcgggaaatgccttttcccacttggaacgcgtgatgcctccctcctagatgttcactgcacagatctaaggaaaaaccttgacaattacaggccctgtggcgtcctgaccgtacacattcctctgctgtgactcccagcagaactcaagtcttgctagttgcctgtgggaacttgaacctgtttgaagcttagtttaaattttttaatgtacatcgtgcaaaataggaagtttcattgtgcccttttcacaatacaaactttgaccaccttgaccctcctgtcacttttaaattcattcttcctcagttactcactgcctttgtgtttgattcaggaagggactttattcccttggttcctggtttctggagcacctttgtggtggttcctgagcagggtgaagttggtaatgtttagcccctcagatcccctgcagatacaacaggaagtgagaaacaagaaggcagcacccaggtgactgcatcattgctgatgtcatctatttttggcattcgaaatcccagcctctgctgtgtctgagagtgtagaaagttgggtctggtgcggagacacacccatagacgttgatacgcccgtccctcttggtgtggtttcatgtgtggtggcatgtgcaggagcggctagggctggggcttttgtgacttgggattggactcggatctcttggcagtcctcagtagtctggtcaaaactgtctcccagtgtgattcattgatttggttcggggttgtctgagcgttctcttcccccacacagacttcactctgcttccaccaggtctaacttgtcagtagctgttttaacgattacttagtatgtactggcacagtcctcagtagcatggctacagtgtgaatagatagtctaattggatatgctcagtgggagcccaatggattattatctgaggaaatggaagcttagaaaagtgaggtgccccagccagggatacaggggcagagaaggtagagtttgatagtgactgccaagacgtgggcttgttctctctcctgttactttatcacaaaaccttttcctttgctgtttgcttaacctctcttcctgtttttcctgacttcccttttccctcctacctcttaggagctgtttacagttttacatgccaaacataagttttcctgggacataatgggctttgttcttagatttatagtgaggggcttgctcctggagaaagcttatctcagggggtgctcgttgcaccttgtattgtgttttatggttttgttatatatgtccttgttcatttgtggatttgtagtgaggaaaggactgttacctccatttacaaagcaagagagaactcagacttaagtaacttacctgagatcttagcatagagagagccaacacctgaactaatctaacatgagcatgtacatgctagttggcttcatagattaaaagccactgtaaacagaatgtttgctgagaactctacaaaattagttgatgagacatggttcttggcctcgacaattaagccagaacaaacaatactatcagctaccttccttaattaaaaccaattagagttggctaaatattacagcacagcattttctttaacagtggcatagtttttgagcctcgagcattgcttaagctggattttctttccccatttttaatcatgaaaggctcggtcttcgtccttgaagttgctctctgctcgtccctagctcaagggcttgcttccttgctagaatagtcgtgctaaaggagaggatgaggcagaacagacagaaaatgaaataatagatctgagaatcccagccaggcttggtgagcaagggcaattttttaagtgtgtatgtatgtatgtatgtatgtatgtatgtatgtatgtatacatgcgattttgggcgggctttcactaggtatccctggctggccaggaacttgaaatgtagaccagagatctacttgcatctgcctcctgagtgctgtggttaaagatacgcacttaggcttggctatgagataccttatagtggccctgtcgtaggaaattcagtatgtattttataacatgggaagatggactctttgagagatcagaaaacctctttaacgatccacttttggaaatattatgtcgtgccagtatcttgtttcatgcaatttaatttttagaagccatgagcgtttttatttagttaagcattgacctgctgacaggccccttctatggaagtgccatgcagggtttgccctgtggctcctttgtatttgccagcaggggctggttgcctggtttgtagctctaaggagttgccctttgctgtggttttactattgagatccatttcattcatttggacagacctttcacatctagtgaggagactcttgacattcctgccgttatcaagtcaaacagaaaagacttttactatttctgtgcctggagtggaaaagttttagtactgaattgcatgtgttgccctgttggtattctcagtatgggttagcactcaaagagtcacagactcccaatgcttctaatgaggttaattgtaattcagcttcttgccaggcactgtgttaggcaagagagacatgtgacaatgtgtcgcccttccgtgtagatgggatgggttctgtcttgtgagtggtgtggtgagtgcgtacaaagaactcaagttcaaacacagaggaaccaggtgggcaggtgggcaaattaggaaagtgtctttcatggactcaactgtgaattggccattcgagagtgaagaatgtgccgggcagaggggttagcataatttgggtgtgtcccaatgacacctatgagttatatgctaattatgtaatttttttttttttttttgtccagttggatttgaggcctttgagcttagagaagggtggatttcagcatctcagcagccacacagctgggtccatttagtgctttagtaatgtcacaggggtagggatacatagtgagcaagctgagagaagggaggccagcaatgggtggaccaccaaaatgagttaggcagcttagctagaaggaactggggtggtgggtgtcgtccctgtattcagacctagggtatttcttcatgttgaggtaccggcctgtgctccaggggacatggacttagaaggtcatggtgctctcttgctgcacaggcagccagccagccaggcgtcactccgtaatggtattcataggtgtgaggctgtggtgggcgcagctgcagcagcagtgagattaaaaaggggcccctgtttaggaaccgagaggctttcccaggaaggggtagtgtttgagctgccatttgaggcttgttttattattatttttttaaggccaagtagccacagaaagacatcatacaatgatgtaggagactgaaacatttggggagggggcacaggcccctggggtttttgatgttgggacatgagcctgggcaggataagtgagccttttatttgcagagtgttttgtctggcttgaacgcctgaccttttgtaagtgtttcgttgcctcatgtaggcctgacggaagcatccttgttgagtgtccctcttcctgcatgtggagttttcagcaagcaactgcctttggcttctcttttgggaaattagacagagaaagtggcagcaccatcagctagagagaggaagaaaaaacaatctaccaaatgcctttaatgaatgcacgaacgaacctactctggttcttgtataaagagattgctgcagcaaagcacagcttcaagaccaagttgtcctgggaaggggcgttgcgggagggaagcactgttttgtcttttctccgaggcttatggaacacttagtttctgtgggataccttcaagtggtgtcaggcattctctcccccaccctgctgctggtcatgagttctgatgcacagtccacaattgcagctcgaggctcatccgtgtactctctgcagtgccggttcttcagttatgtggattgggccgaggaaacaatacatttaaaccgttctctgtggagactgcaaggaggaaatgcccattgtgtttctaggccatgggtctgcagctatgttagctttagtgccataactggctctaataaacatttacaagcaataggcatggctgtggggatgtgaacgacaaaagagcagaaggagaaaggcctgcagagcaatgggggaggcccaagttcatgccgttaggaaagaccaggtaagaaagacctttccaggtgagagttaaagtggcttaactcacagttgccgcacggtgtcccgtggggattggtagggcaaacagtggcagtgtgtgttagccctgtatttatagattcaacttaaaatgtgtctaatagagactctctagatttgagaaaatgggaaacaaaaaccaacactttaagtagtagtgaacattatagccccatttctgaaatgtagaaaacatttaggatatgaatccataggtttttttgacactggggcataagcactgttttctgatatgcccttgccacactttgtgggtaattcctgtgttatcttctttccttcagcatgtagccccagtcgggggaaggtggggggaagtgataggaatgtctgtatgtcaggcaacatccatgtgcaggctcctcagatgccagaagaaggtgttggaccccctgaaactggagttacagatggtggttagtctccacgtgggtgctgggaactgatcccaggtcctctgactgttgcaccatctacaaccccgtgttattagagttttccctagtacagaactgcagtttctagcggatggacaattaagtgctctaagaggaagatggatgggagcagatctggaacttgtgtggtcctgtccacaaaagccctgccacacacctgccccagaaaacagcccctgggttgaccaccaaggaaatcagatgccaggctttagttttcccacgataactgtaagttatttcactttggtgtggaaaggcgctctccagttcatatctagccagttccaacaggaagtctctctctgtcactgccacaaactagattctgatttctgtgtaaatatttaagctccttcggctcttatggcagctggctctctctctcttagatggttgctattctccagccttctgcctcactcgtccactccatatgctctggggttggtgattttgtgtgatctgatatctttaatgggcactgtgcaatgatgacttccagacttatatatcttaaaaaaaaaagtatttaattatgtacctgggggagtggagtatggttgcccaaagaaacccaaagcattagattccttggagctagagatataggcagctgtgaaccacctgatggatgtgggagctgggaccggaactccgatcctctacaaaagtggtccttattctttttttttttttttaatatataagttggattttttcagcagcatttatttttattttttaaagattttatttatttattatgtatacaacattctgcttccatgtatatctgcacaccagaagaggtcaccagatttcataatggatggttgtgagccaccatgaggttggtaggaattgaactcaggacctctggaagagcactcagtgctcttaacccctgagccgtatctccagcctcatcaaaccctgtgtcttgctcagccttctcttctgaacttagattcctcctacatatcaccagcctggtgtgttctacggataccttggattctgtttgcctctactttgtcttcccctgtcctgtctcttgctcatttcagggtgtgatgttattctgtcagtgcatcacagtattcttttatttttgagatgatatttcatgtctgtctgcctcagccttccaagttaatctgacctataaccctggaaattatccttggccccttccttgttggtcactggccagtcatttatgaagcgtgtcttgctgcctgccctccttcatccttgtctttgcttctcccttggtgtcattgtcttgacatcagaagagagtgagacacagcattaggagggtaggagagaaccaactccacgtgaagtcagtgtacccctcaatgaaagcatgccatttaaaatcttaatatgtccagtgattccctataacctccctgcagatattcttcccagttttggttaaatttgggagcctccaggtcatcacatccatggtttactaaagttagtggctaatttatctccgtttaatccagcctgtgtcatttctacagtgtgacttaacctcagacttgagggctttctttgaaaatgactccagggcctgagcacatgttaagcactttctccaatttacatcatgtctcatgcctgctctggccacagtgaacctggagtttttcttacgttgggccacacacacacttctatagcctttctagccctggtgggtaaccccatgtcgtctgcttaggtgtccctctttaaaggacagcttcctttcctctttcttgcagttaggtttgtgccccccccaacacaccttggcttctctaagtgttttatacatgtacctcccatgttgttttacatcctaaagcaatggtaaacaacaccctggttctttatttaccatgcatcaggcttggaacaatgttgactggaatttttttccctgtataacctagcctgttcttaccacagaattaggtaatttctcaggacagcaaaagtggtattggaggatttactcctctctttatagctaatcatctttatttcccttatgcaaatattccttcctgactgctcccctctgtctttgtttggtcagtttctgattggcatggtcataaggaagacaagacaccacagatgatgagaacctggatttggagtccatgtgtaaggcccgaactgctcgcctttccagatttgcacccgtgaagattttgttaggatctagaagtcatcaggattcggggaatgtatttaatttaccaagcgattgagagcctgatgtataaacggattgctaatgagggactctggggtgccccctacaggagaacctcttgggaaaccacagtctctaatcaggtggataatcccaacagggagtcactaaaccaggctagcctgatgtggcctctttgtaaagacgcttggcttgtgtatgtggagcacttgttcctcagacaaactgcagggcacaaagccaaacctcgcttgctaactcttgcttcctccccccagacggacagttcccctctgttgtcttagtttctgttctgtggctgtgataaaataccatgaccaagacagcctacagaagacggttcccagggctagttcatgatggcgagcaaaggcctgggggcacgcagatgagagctcacatccaagtctgcaagcaggaggcagggaaagtgcactgaggagatgggggcttctgaaacctcatgcccgtccccagggacacacgtccttcaccaggacacttcctcatccttcccatacagttccacccactggggactaagcattcaagtgcccaagacttacggggggcatctcattccaccgtatctgttaacacagtcttttcttcagcaaggtttctgttttcatagtctaatctttgccttccagaatctgcatcttctcactgctgttggacttggggtgccccaggtttgcacagctacattctgtgttattggatgttgctgattgtttttagctactccttgtggttcatgctgatgttaactaaattttcgagtcatggggacacttactctgcctctttgtatgcctggctatggggcctggcctagtgttgaatacttccccaggtgtaaattgacctactactctctggttctcaggtgtgtgtgtgtgtgtgtgtgtgtgagagagagagagagagagggagaggagaaagggagagagaaagagagagagagagagagagagagagagagaacaggtgtttgtacagctttgtgcacaggtgagtatgcatgcggaggcccatggttgatgtcgggagtcttttctgttctcccactaatcctgtagatttaccagtgcagttgccctggattgtcggtgatttctaggaatttgtctgtctcctgaacggtaggattacatgtgtgggctgccatgcccagcttaggtggaaactggggatccaaacccaggtccttatacttaacagctactttatagatagaaccatcttcccagttccacatctgatttaaaaaaatttaagtcgaatataatttatctctgcattgaatttaataagttattcttctgttaaagtgtttcatatttggactctggcaatgctattttggattattctccctagattttggtgggtaactctaccattacttgataaagatgtgtgaaattctttctcagatcaccgataacagcattgtctaagtcaaacaatgtgtcttgcagaacttaatgaagttaggtttgttaggtttgtttgggttttgtgacaggtctcagtatgcagcctgaattggctgtgaactggttttcctcctgtcttggcctcttgaggtgttcacacacatccaccttgtattctgagtcatgttgtttaatcattgaccaactacatctaattcctacacacacacacacacacacacacacacacacacacacacacccatacccccatgcccagtagagggtaacttgtgaagtgcattcagagagctcacagagctttgtcccacagctttgctgatgagagaaatagcagcacaggtggtgccttcttctcccagaattccagctcatcctttcccactcttgtaaactcccatagtggaatcttcctgctgccctgctgtgacattttaatgtgtctgtgagcccctgtgctctgcataccccctcccccattagaccataagggcattttgcaccagtcaatcacctgtattccacgagcagtgcctggcacacagtgatgcctggtcttggttgagctaattagccaaagctaatttcactacaattctattcttgagagcttcctagaacatgactcacactttcctttagcatctcaagcaggatttgctcttctttgttctgaacattttgtaatttgtgttctctgattgtgtcccacattgctgtttccagttagcatagcaagcttcagaattctgtgcttaattgccctccattcagtcagctctcttcctcccagtggtcacgctgacgtctagaatattgtctttcactatatgagagagacataatgggccgttttagccaggcacacctatgtgccttcattttagctgtgggagaattctagcagatatcctcaaagttatggaggtccccatcacagcagcccgtttctgcatcagctctgtctccagggtatcagtgctctgctgccattgctgcatccagtccagagccccgccccctcctcctcctccgtgtgatgctcagtggtcccaggttggcttgctggtgaagggtcaagcactttctttgttgaatacccagcttctagtcatggcctcatgggcttgctgggtttttgagggaggggatcccagcacgtgattgctaacatccttcccatttgtttcactcaacacatgatttacaggagccttctctgaagtcatgctcctccttaggagttgggtaacaggcaggtgttgtccaggttatcctgtttgccatcatttgttaagcctagtggacgtcagtattctatctgaatggcaatggtgatcatggcccttgttatcagaggccactctctgggcgagtacagtcttcttcattcagtgacacagtctcaccagcaagtccttcctgccctgtacgctgaagtacagtcaggctccatttctgccttctctgtgtctcccagttggtaggagacaacctacagtagtgagtttcttacaaaccatgtctgctagggttgcagtccgggcaatagtgagcagttattgagagctcagtcatagtgtgttgaaactggattcaaataaatctttaaatttaaagtaaaatatcagttttataaagtggaagtgtcaactaaggccgtctctcaatagtatagctttttgcctaatatgtttaaaggtcttgatttgagccccaagctgcagaatcattttttttttttgtagtctacatttggtaagttccatgtattttaattggttcaataaaaacagacccattaaaacttttgctaggtgttggtaagctaaatgctctaaaacattacatttgaaaattttgttattaatttgtttattaagacaggctggtctggaacagtccccctgcctccacctcccaagtgggatgacgggcctgcaccaccgaattcagcacttctcttgtggagtaactatagaggacctactttctcaagtggcccctggttgcagagtcatgtgaagagttgtgtgtttagtatcgcagaatgaaacgagtgtttgctgcatgggctgttttagtgggcactgcatgtccttctcatcctgggtttaggaaaggtcagttggtgaaacataccatatataggaagccccatggctaaaaacatggatgcatacatgttagtgctatgtgtgtgtggaaactgcttcttcctaagcagcctgcagcatggctggccagagagatgatggtttaggtatagtttacctctcaggcaatattcttttaagacagttctgactttctctctggtctaagcaccctttaaaacctagtgccttttctctggagatggggaggtatttgagatttttcattactaaatccttggcggatacctagagaaaccagttgtcatttccaggaactctattgtcctgggtgtagggcttagcagcatccctgctgtcacggtgatgacacttgaagggcctcctacagaacagtgcatctcaacagtcttttctgttataccagtaggacagcacttgaccggcccaggttgctgtgcagagaggctgggctgaagctgaggggggttttttttttttttttttttttttttttttttttgctagatcacatctgagcacttctgtacatttagggttaccagattatcatggggagtgggtgtggggaacctcatggctgcagcatacgtgacaacaagtctgtctgcatgggcttgatttcacaccttattgtaagattggtagtaagtgccacacaagttctaaaacaaaaatggaagttggagacatgagaatctagcaagggagggaatgcattattctctgtaaatgcaaacagaaggaaaagaagggacacatgtatgtgtgtgtgtctgtagaggtcaggctgaccttggtaattgttcctcagagtttctgtctactgtgtatttgtgtagatgtttaaaatatttttatgtctatatgtgtaggtctgtgtgtaggcgtgtgcttatataaatgcaggggcttttgtagtcccaaagagggtgtcggatcctcaggagctgccattgtagaccgttgttagccacctggtgtgggtgctggaacctctgggagagcagcaagcactcttaaataacgagccgtctctttaggccctgtgcctggagctctcaggatggaacccaggttctcagggatgctggcacttacttcatggttccctgccacagttgttactcacttggtggtggtgcaggagattgaacttggctctgtacttgctaagcgagtactcctcatgtgagctgtctatccctccaaacctgaggaaggaccatgtgaaatttatatcgtcaaggcttggtgttaagattgattacagcatgccattgggttgttgagggagggtaccaatgcatggtagaaataaagttacatatttagggtgggtcacattacagaacttaataaaaaccaggcctacaagtttacattggaatgactgggcatcatcccagttgtaaattcagagcatcagcttggagatgagaggctggcacctggaagccggctctcgtgctgcttcagcagatgggtcctgcagcccggtgaggatggagtgagaatgaagagggtggtgggatgaagtgagtaaaggagaaagctgcttcccaggctccttccccgactggaagcagggtcaccaccatggtcggataaggcatagcttgactgtggggagaagtcaggcatttaccctggccataataaaatagataccagttaactcctagacgttgcagctgaaatgtacccagagcgtagagacatgggattgtgggaaaagatttaggggagttccttggctttgttgagggttgcttaacttggggaagggatcctctcccagagtcagaggcgcagaccaagggcactctcacagtcatgtctgataaaagtctgaagaggtcttcttacacgtgctgactgaaatgcttaggaatttctcccaggaatatggcgtacagtgctcttcaggaaataagaaaatgccaaaggcaggaaggagccgcactaccgatgcagcctctctcctggcctttttcttagaaggggtaagaaatccacgcgtgcatgtgtatgtatagaattgtgcagtatatacctcttttcatttttgttgagacaagctctccctatgtaggctgcttgaaacctcacgagcctcctgcctcagcttcccaaagcctggcactcgctatgaacaccaggctggccccaaactcaagctcacagagatccacctgcctctgcttcccaagtgctgggattaaaggtgtgcactgccacacccagcctaacaaagtagcctttaaagacagtacttttgtcacctcaaatgttaaaagaattacggggttatttcatgaaataccacacctggctacattccttttaatttttaagatttgattgacgggggcattagatggctcagtggttaagagcacttgctgtttctgcagaggaaccagcacttacattgggcacctcacaaccacccataactccagtcccatgtggtgcacacacagttaagtaggcctgtgtgcatgaatgtgcgtgtgtgagcatgttcacacagacacacagacttccttcattctgacccctgcctgcctgacctgtttctggctgtagtgtggcaggctgtatagtcctagctgcaagggaagccgtggccatgtctggtcatgcagaggcacttctgttacgcttataattattaatgaacttgtatgctgctttccactgaagcttcgttaattttatttcctcttaagagatgatactgccctattgatgctgctaaaatcatccttctgagtcagtaagtaaggttgaagatggggccttggttgtggtaaatgaccaagcttatagatgcgttgtcaagaaccctctgaggaagttagtcactggcctctgccatgtgagaacacaagacaggtagctcttagagtccacacattctaacatttgaggtgacaaaaacactccttaaaaacatactttatgaatcccagtgcttaggaggcagaggcagtggctctctctgggttggagtttgaagccagcttgtgctacatagggaattccaggccagccaaggctacgagtgagaccctgactttaaaatgaaattgttgcctctaagcctcgtaggggagtgggcgtgttgcagaagcgtaggtgacctagagagcagctgctcgggtgtacgcactcactcccaccaaagaaaagttttggtaaagaagacaaaaacaaaacacagaaaattcttttcttagttttattagcgaagtactagtttaaaaaaattttaattcagaggtttgatttgaaatataaacttttgtactgaaaatttctacggggctctgcctgtatcagatgtgaccctttgtctcagccaggcatagtcttaaatttcagtattcttatattccacttagaattttccccactttctacatatttttttctttcttttttcagctcccagtggaatcacaaagggaaaagaagaaaaataaagtgtccatgtttatacaacacaaagtagccgttcagttccttaagaattgttggtggttctgaggttttatgccattgggccggtgatgaggctgtgcagccagccctaggaccagggtgtctgatcctctgtagcaagttttcttgttagaccatatttggatctccagccccaaataatgacacagagactcattattaatgctcattatgaaagctcagctttaggctttttcccaaccagctcttataacttaaattaacctgtccctgttaatccacattctgccacatggcttggttacctctgttctgtaccatatgtatgacttttgcagagtctgtggtgaaatccatgcgtttaaattcctcctcctcctcctcttcctctctctccccagtggaagtcctgcctgtcctctcctggccgttaagctctttattaaaccaatcagaaagttctgtatgtggagacatagctctacagggtacacgatattccccatttccccctttcatctaaataaaataaaaggttttaactctaacactgtaaaactatatacaataagaacagttttcaagttagaattttatccatagtgtccagatcttttgtatttcgaagttttggagaaaatactctattatctatcctaaaccactttctatcataacgtattaccattctaaaaatatctttttagactataaagcatcttcttagataagcaatttaagcttttatgcctctcaacctttattaactttgcatttctttctttcttttttttttttttagtttagtaacaaaactgtataattatctagtcttcaacccccatcagagacccaagaaggataaaatattacctgggtaaacaggaaatgtagagcaaacaacttccaaaactatagaaatgaccaaatggctggctgcctgtatagtcacccagggttcctctgttatgttggggcatccatcttcagccaacaggcctagaatatcttgacagacttttctgtgaaacaggaattttgaaggactgtcctaccttgtcttggcaaagttcagcagtcgccttcttttgtgtcctccttgcccagtttggacagcacactgttagcagttgaggctagggcagtttcttgtccaaatggccagttttgccacatagaatgcaaactccctatggaggttcttcagtgcccatcatccttttttgaagtaaattggtgttacagtagatgtctctcactgtcatggaaagccttatgttattaaaacattgtcagtgccatattctgtaggtctctgaagtatttgaagactacctatctgtctaaaataaaatctctgtttgaccttgaaaacatatgtaacagggccacaaatgtgactgttatagatgacttaactgctaacctgtatttctttattatcctaaatagctttcaaggactaaaactttacatttttaaatgagctgcataggtacaatacctttaaacaagagtagaaacatacatgtatgtgcgtgtgtaatattctaatataaataaccttaaataactatgacatggcaacttattattaattatgaagccttggctttttttccttggctaatttataatgtaaattaatgagtctattcatcttcattccaccacgcagctgggttgcctcaggtgtttaccctatgtccagcttcctcagtctcactggcttctccctgtcttcaggtgactaaggtgattgcctgctcatgatctgctcaacagaagacatgctactgtttcctacttgggttcatctgggtggctccttagtttaaaatgcttcccagattgcatttgatgaagcacaagccctagaagaatctgtgcaaatcctcgtgtcaatgtttcccagggactggagggctcagcacttagaccagtgcccgaagccgagagctagcgaagaacagtcgtagtgctgcgctcactccttcctcctttgggacacagagcttcttcttgtttgtgtcatctttactgtatggtgacattttaaagattcctgttacatggaaattaagccttccacacagtccaacagtgcgcacattagtggcaatgaactgtttgtggagcatatattttattgcccaaatattttattgtcagcttttgggatcatggtttattatgacttccatcctcccctaagggaaagaaaatccgtaaaattgtctgctcagatccctttgttctagttagggtcgccattgctgtgatgaaacattgtgaccaaagcattttgaggaagaaaaggtttatttctgcttaccttccctgaaacagcccctcactggcgatgaaagtcaggacaggaactcaaacaggataggaacctggaggcaggagttgatgcacaggtcatggggggaagctgctagctggcttgctcatcgtggtttgtccaaccttctttcttgtagaacccaggaccaccagcccggtgacagcaccacccaccatgggcgaggccctcctccatcaatcactaattgaggaaatgcctacagtctgatcttatggaggctttttgtttgtttgtttgtttgtttattggtttagcatcctgacaagattcccccccccccagtctccctgcccgtccatttcccctcctctgtttctcttcagaaaagggcagcctccatgcatatcagccaggcctgatctatcaagttgcagcgagactaggcacctcctcttgtattaaggttgtacaatgtagtagggcaaaggaccccaaaacaggccacagaatcagagacagccctgttcccactgttaggaattccacaagaagaccaagctacacaactgtcacataggttagtcctaagaaggcttcctggctgcagttcagtctctgtgagcccttttaaggccaggttagttggttctgtgggttttcttgtagtgtccttgaccccacagcctcatacggtccttcctccctgtcttcctcaggattccctgagctccgcctaatgtttggctgtgggtctgcatctgtttctgtggtcgctgggttaaccttctctgatgacagttgtgctccatctttgggtttatcagagtatctttaggaatcatttcattgagttggacacctccctgtctcatcagatgtgaccttgggatctgtagtagtagcccagggagggcaaatgtatcttgtttgctgtttttggaaatagggtttcctgtgactcaggctgtccttgaactccgatgtttgaggatgagcgtcaacttctaatcttcctgcctctaccaaaagtgatgggagacggacaaccaagatgagtctcgagctggcactctgcttgggtgttgtgctgtgaagttgtagactcaagttccttggagttgacctgtccgtgtgtaactcctgtagctgatatctcagagaccctgattaccctgtgatggtcttcctgcttaccagaagatggctccacaggtgttaacagtgtagacacatggcacttttggatggtgcgatggcagtgatagtgcagtttcttcagatgaccacacctgtgtccagtgtcccacaggggtcctttctgtgcatttgagtaccaagacctagacaggcagagtcgctcgtctaagatcacacagccgtgagaatggggtgggactcttaactcagcagtgccctttgccacatctaagaagcagatactttatcaacttgggctctgaagaaatactcatttatagttttaagagactttacttaaagatgtgatagagagtgggaaaacacacttcagtgtggtacttacagtcacacactgtcaggaccagagcaaggctcggagctggttgctggagggtcccacatgcacagttcatgggcctcagtgagttgacagtcatctgaagatttcagatgcctgtaattcagtgctccacaggccgtgtgccctggagagagtcagggaataatggtatagaaaacactatggagggctcttccagctctcaagcttgaatagttactgtccatatcggtgtagttctcctgagagagagagagagagagagagagagagagagagagagagagaatctttctatttcttgctcaaagtcgttagttctattatcatgtctctctctctgtgtgtgtgtgtgtgtgtgtgtgtgtgtgtgtgtatgtgactgttatagatgacttaactgctaacctgtatttctttattatcctaaagcaccatcctgagaaacatttttgaggcaaaatctctcattggcctggagcacattaagtagcctgggctggctggctagcaagccccatggatctacctgtctccacctggtcagtgtactggaactgcaagctcaggccatgttgtgtgcctttgggggatggactcaagtctgcacgctttgctgacttagctgtcttcccagcaacatagctctcacatagctatgtggaagtcacctaaacacgtctgaaaagtgtctgcctgtccactggctttgggttacagatattttcctcttcacctgaattttggatttaaagcatctcattggcttgtgggttttctttaagctggtgtttctgtggcaactggctgtttccaggtacagttttccctggttgtggtttatgtattaatttgtctgtaggtagacctcatgagtaaaaatcagtacttagaaaagattatgggatgttaccagagagacagaggcatgctagggtttcttaccccttcaatttgagaatgggcagagctggaaggaccatggatgggaaggccagggctctgaggtggccagtgagggctcaggcacatgactcagctgggtgtgcacagtaatggaaaagtttctaaattgtgccatcaactttaaatattacatttttcctctctttcctcctcaagaaagtagaggaaaagtctcccctttcccgcctttgtgtagtcaaataaggactaaaaatgaactcgctgtgtggaagtcagagcactgattgaattccatatttgtcttggaaggaaatccagactcctgtgtaatgatgactggacggtgcctctgtgtattccagggcggggtctcttgacactctctctccttgagttacagagtcactgctaattgtttcgtttttctgttttctcatggccgactgtccctatgtacacagtgtatcagagttgttgaatctgtttgctcggggaggacttaattgtagacgttctcagagcccaatgtaattaaaaactttgacagttaatgtgagagatgaaatgaatactaggaaacagaaaacctgactgcagatgagaaagagagctgggacccatgactttgggaggccgagtctggagcagggcatggtggtgctcacctgtgagccccacacaagggaggccgagtctgaaggaatttgagaccagcatctttctccattcttaaaaggagggaagagacttagtttctaaggaaagagtttagtgctcttattgtgcagggacagacagcagctgctcctgggggtgtgtaggggccttgggtgtcaaagggagctttactttttctttaagaccctcaggaccttgactgctgacagagccgttgtgtgtggctttcctgtctttactttgtgagttttatctattttctttacactctgatggggactgttctctctgctgatccctagcaggtcttggaggtagagtgggaagggcatgagttagccactcacagtggcttccttttttttttttttttttcccttattcttgtctaaatgctaatccttcaagcctcaaacttaatctttaccaggaggaacaggtgtttgcccagatatccaatgtttgggaggaacaggagtgcacagtgcaagaaaggccttggctgttgagtcaggctgtgttggctataagacttgagtaaggtgtgcgtctttccatagtgctggtgtcttctgcagagttaagtgacatgttagcatgagtagagactgtatatgtcaagatatattgcctggcacacagttcatgttaatgaactattttgagttatattgtcattgtcagtaactttggagtagtgttaacattctttaattgtgatggcatggaatagaataatcacgtctcaaggttttgatatttgatatacacagctgataccaggaaagtggtataagaaatagaggcatggtggcacacacctgtaatcctagcacttggatggctaaggtaggaggaagacttcaaagtcaactaggctgtgtagcgagacccagggtcagtagacagagggagaggaaataatggaggaagtcattaaaagaggcagaactttcagaacagtcatcagcagtggggccctgcgttttttgtataaccgttatttttcagtgctggtctctgactcacttagggcctcttgcctgtcagtcaggtgtgttctaccagaatctcgtggctgagaccttaaacgcttaatcttcctgtctctacttcccaagtgcaagaattacaggtgtgcacaccatgaagtctggccacaaataacatttttgaggagaaattgctgtttaattgtagaagtggaagcaaaagtccatgtagtttgtcatctagcctgatggcttcctttctgtgtgcctgtctatgaggcagtgaggtaaagcacctatgtgtcagcacacagagtgttctacaaagttctgtggtactctatggtgtcattaagatctgccagtcagcaaggagttgccacctgcactgtgtggcagggaccagacagaacaagctatcctgtttgtgagtttagcatttgtccactttcgaaacactctccctgttaattaggtacctactgtatacaagacgttgtcctagaagctgaaactcagttgatgagctgtgaactccaaggctatgtctgtccttttcctgaaagtttctatgtatcatgaaagatctggacgagtgtagctgagctacccgttcctaaagtcttttctgctgtgaaaaaggagcatattacctttattgcacattaattattccttacacttttaactcaccgagttctcttttcttccctctaaaacccaggaagcacatacttaatgaggtctcagaactcttcctgatgctgctgtgcctcaggcccccagcctgctggaccatcctcactgtctctaactgctgagtaagcatcccttccttcttccttcctgtgtcctctgcatcactgtcagccgccagacccctgtgctgcactgtgagctggtggagcactcatctcctggctggtgtctctagcagggcttccttgtcaattccacggaggtaccagggctccctggcttcacagtccttccctgtcgggtccctgctgtcctttccagtcctgtctttgaccactgtctgctctgttattcggggtgcacccagcaccatgtgccaccctatgaataggcatacttcttatgtcagttaaatgagtaaattttaaaaaggtaaaacaactgtggaatttgcatgtaattaaatatttttttgtaattattttttttttaaagctctgccccagtccctctggagtaattagctttgaattttgcgttttggaaggagacagaatgttcatcctgtttacttaactaaaaattaccctattccctttttctaaccaaatctagtgctggtaaaaatttctgactcagtagttttggaaagagctgcttctttccagaaataggcacgctcacaccctgggtcgtctatactggtaacttgccgtcacgtcaggaagctgggtggatgcagggacgagggactgggtcaggattaggccacggtaagggcctccctagctagtctagaggggccgattgggagacacttgtttttacgtcactgtcctgtgactacgagtgtccttcagtagcaccagcatctccacctggcagtgagtcagggctaagctgagctgcctgctgtttgtatacagcactgtagcttacatcagcctgtcccttttctgaagccctgccgttattatacagtcccacccaggccatttctttttgcccccgatgcctatctgggttagtctatagcagtattgtaaattcaacagtattgtgtgcttatttcttactgcttatactcctactgcctaatacacctaccgtcttcatgatgtgaccactgtcctgcctgctttattttactaccgttatcctggaaacccacttggcatgcaaacactaatgggcttatttgttgttatctagctgtgtagcctaggctagctgcaaacgcatagtcctcctggaggagtactggcgttgcaggtgttgccgtctcccttgttcgatagtgggtttttaaatatcttattttgctgtctgtaactatgacagaaactgtcagtttgtatgtaacgtttggagaggggcttcagaaaaccaccgtctttcatttcaatctgtgtgtctgtggtagcagaagtcccttggccaaggaaccggaatcaggcggaagctaagatggggctggacggtgagccacatcttctctaagcagaggcccccagggcagactccacgttctgttggaaggtgcagctgagggcagggggtgagaggattcctaaccagatacatcatgcagctatgaaaaggaaagtttggttccatgtagtagcggtaaagaagagtgtgtatctagttcagtcagccatgttctgtggttgctcgtacataccatctagtcttaggtcatgcattttttctattttttttttttttaaagacagagtctcatataatatagccctggctgacctgaaacttgctgtgtagaccaggctgatcttgaactcacagcttcccaagtgctgagattaaaggcatgtgctgccatactgggctcctcacctagtttttgaggatgttgtgacattcttttttttaaattttagatctgttcattttattctatgtgtatgaatatttttcctgtgtgtttgtgtgaatactacatctatgtgtggttcccatggaggtcagaggagggtatcagataccctggaactggagttgcagatggttatgagccaccccgttggtgctgggaactgaacccaggacccctgcaagagcagccagtactcgtatctctgcaaccccttctgtaaaatattgttcagaggcattagtttgtgaaagcctggatttgttgcttttccataagttctaaaatggaaatatgtgagataaataaaattggttatgaagaacttggtatgaagaacagacctctcctcagggagggaggcttgctggactggcagtgggagatgcctgctttgcaggcccaagtcccctggttggttccagttaccacaggctcactgaagtgaaagtgctaataacacgtggctgaatgctttcagagcagggctctggtgcatttattggttctgtaactgttgatgtaatccaggctgtctctttgtccctggctttgaaaggcacccacttcacacacggcacagataaaaggacactgcgagttaagctttgtgcctgacaaggtagctcacagatagagtcactgttttagcataagacctgccagtgctggggagggctcctttcaaattctcaagtagcagtttcagacatacgcacatgttggctcttggtgttatttacacatgggtttcttgcgtacggtagaagttcttccattagcaaaactgatggacgtttaagaacttagagaggagtgatgaacaaaagggtcaagaccatgctgaggaaacccacagaaacagctgacctgagcaagtgggagctcatggaccccagtctgacagctggggaaccaacataagacggaaccaggccccctaaacgtggatttttgtctaggaggcctggggagtctatgggccctctctcagtggaaccagaatttatccctagtgcatgaatggactttgggagcccattccccatggagggatactctctcagcctagacacatgagggagggcctaggccctgccccaaatgacgtgacagactttgattattccccatggaaggcctcagcctccttggggagtggatggggtatcggtggggggcatgggagggagagagaactgggattgatatgtaaaataagattgtttctaatttaaataaaatttattttttaaaaaagaacttactgattgtgcagtgaaagaaaatcaaaaccagtacagactccagttgtcatcatccccctccccccctccccccgtccagcatttgagcaagatacatgctgcagtaaaggttttcattttatggaaaatatgagaaaaacacatgagtttgagtggaggagaattaggttatctgtaagaagaactttgagcacaggctgccaaacagataagagggggagctactttctcggtgctagggacagcacctcctacaatgttccttttggggctgtccgaaggcagcttggccctgaacttcacccctagttccctggcagggcgtctatgccaggatcccttctccccttcagtggtgactaagcttcctgcccagacagtaaagcatttggaaacctgagcatagacagtgtctattttaaaactctgacataattgagagtccatccattaaaaagatggtccttaggcatgctgagcacagcttgcaaccctcagtaggatagcagtgacagggagggggggcacttgggtgatggccagcaatgcattatccagactgggatgtggtcctgattttaataaagaaaggggctggagagacgactctgggtggagctcctaccacacaagtatgagaacctgaagtcagaccctcagcacccatgggaagccagagacggtagcttgaacatctgtaaccctaggtctcctacagtgacatgggacatacagacaggagaattctcagaaggtgccaccagctagcttggcctaggcagaggggaactgaaaggagagctggcctccaacgaagtggaggggaggactgacctccacacttgcattcacacacgataacttacggacattggctcaaataaatgaataataataaacttaatgtctgagtatccaaatcttagtttacaactaattttacttaatcttttaagtctttgaattatgtgtagtggtttgatgtgagcctgtggatttataggaatataagtcttctgaaatataatctccattctcctgaaatagccaagttcttacattgtgaggcttttctatgctgagaacatgaagtcacttaaaaactgttagcactgtggtgtgacttcagctgcttaaaatgggatgtgacagctgtggcgtccagatgtggtgtcctgatgtctgtggaatgagcttttccatagacaacaacagacacatcagggaggtaggcttggtgctgcacaccattaatcccaacactcgaaacaaaggcagacagacttctgtgagttagaggccagccagatcatagtgagaccctatcttgaagaaggagaggaggagaagtaattatttacaagtcatagaaagatacttaattcattgttgtcaaagaaacgtgtaaacaaaaccaagattcctctgtagtggacatcagcggggctgtcaagaagccccggggttgattttccttctttgaattcagtttttgacccacacataaggtgagaggggaagcagtaactagggttagattgggatcttgtgttagagcagatggggaccacggagtctgggctggtgccgtgtcagtgttgactgtgagcttctctttaggactgtgcagtgtcctagaatgccactgccctgcacactccccagcttcactgtgggccaccgcatagcctgtgtaccacccttggtctgtgggatacatggcctgtctttccacaccacacacgtgggctgaataggctgttctaccacaccccatagtttgttctcccatgtgtctgtgggctccacttctggaaggtgagggggatggaggggcagttctgtcccttagtgacagataagatagtctttacatcacttaaagggacagttttccgtaagcagagtttgcttttgaaggtctaaccctgtactcagctgtatttttccatagtagaacctgtgctggagtctagaaaattctgggtagactcaaactcagaccctgctttatggagggtttcctgagttcttaggtgacaggttgctacagtttatttttattccattctaggtacttctctctctctctctctctctctctctctctctctctctctctctctctctctcacacacacacacacacacacacacacacacacacacacacacacacaatatccaggttgtgcttcagtgttgtttagggctcagtgataaattgctcaggtggtcatcagcacttacattttttttaagttttaaagatttttgtactgtgatgtgttactgatgcgttaatgggacacgtcccttctgagtcttgtcagggtggctgaagttgagccgtctgtgtgcttagcacagtgtcagttacaagtcacgtgtgcctgcttttagctgggagcggtgactgtggtcacttgggatggccaaaaaagtctcttggagaattaaaatgactcaaaattagtaaaagccactcgtggcttcttaggttttaagctatacacttgaattttagtcctgaattcttgctcccataaaggagcacttgtagttcagtttcattagtctgctcttgttgatttcagttgacaggacggacaggcacacacaagttagtctcttagtgtgaatgactgtgcttgttagtgtgtgtgtgtgtgtgtgtgtgtgtgtgtgtgtgtgtgtgtgtgtgttcctattagaagttcactgttagaaaagggaagtgccccagatgcccacgctttacatatagcgtggctgagtcacttggccagcctgcttccccagctggctcctcccccaaccaggatgtcataacacctctcaccatgcatgcccgttccttaccctgtctgttcattggctgttgttcttcacaccaggcctcaccttttggcacagtacctgcatctggtctgtctggcagagcttccttggaatacagagggcacagagggggcaggctcctcctcacatctggagcttgtctctgttcctcctctctgcatgttggaagcccccttgccttatactgcaggaaggtagtcgaggagtgcagatttgtgctgccctggtctgtgacttcagtgtaaacctgagtcattggcagggaagtcacttgaaaagactggtgatttgagccctgtaataaggcagttttgcgtctccctgtgagaccgagaaagtctcttcaggatcgtcctcactagtcatcctctttctgtttttagtttgatccatgacatcaactcttctcagagtcctttggttcctaggacagaactcaggtccactgtggtgcagggctctggctctgtgccatgatgcaggctgacacctggaggagcactctgtgtcaaggcagagagcatctcgtagcctgtcagcttctctgtgctttgattggctggtgatgttgaacatgtatggtttatgctctttttatctattgtctttttaaggtcttggtttacagatgtgctgtttaaaaagctgcatatgacctccacatacataatatattttgagtttttaatatatgctcagtgttgaacttgaactgactgaatttctggctttctcatcggcactggggaagaggctgtggttggctgctcttacatcaaggacccagcatctgggagtgctgcagctccaggcatcaggaccacagtcagaaagggctaggagacttcacactgcgagacattccaggagtgttaaagatagtgaagtgaaattcagggtcaggtgaaggccactgcgttctgcctttgaaggagacacacttctgcttatatagatgtgtgtgagtgtgtgtgtgtgtgtcccttctgctaaagaatgctagacttcactgttgatagtatttccctgatgaattgggggtcacttgtttaagtgaacaggaaattgaagggcactagtgtatgtttctcaatccaggaattctaggcttacaggttgtatcttgtctttttctggctagagaaaggctttaataaaagacaaagaccagtgttaagtccgttaaaggtgtaggtttacaaatttaaagactgcctgtgtttggttagaaaagttcttccttgtaaaagctaatctcaccaagggctggggttgggcttcactgcacacccgtctccgaaggaaaacttccttctgaagataaacacagcaccaggtggttttgtaactttgtacccaagtgaaatgattgcaggtgggtgtatgcatggacccaactcaccagattcaaacggtgttagcatggcactcacaatgcctgcccagtgctgcaggcattgactgtagaggcagggacagcatttgctctggcctggttttcagtcaagctatgtggactttgaggtgcatctaacaagaatggaaagactatgcgagtgacaattataaagggcctaaaaatagttttcattcacatctgctttgggtttcggagtaaagaccgttgcgtcatcatctggggaggaaggaggtcttatctgcgtattctttacaaagacccaggttcaaaagtgcgcatttgggccttgtttgctctctctgtatgtctaatgcaggcactctctgggacttgacagttgttttatttccccctcacctgtgtatgtgctacacaaaaatgtcttccaagattctacttagccatctgcctttctcctgtggcctgcagacctgctcctaaaggcaagtttggtcaactttggcagttaagtgtcatcatctcctccagcacttggcagtggctggggaccccagggagacagggatccgttctttagccatgccccccaccccatcctgaaatcactgaatgtttacattgagtgactattctctctagataccagcctggtttcctagcaacagcaccaacctaattcagacttctttttcctggcctgtagtgatggagtgctttgtgacagtattgggtcctgctgctcctggcccacctcctgctgtgtgaccagtctgcacactgctttttctgctctctacaccagtcttccctaagcttggtgaggatatagtatcttccagaatttgattggccactagatcttgcatgttggctgataagccggaaacattctgcaccacccggctgcaaccagtcggcttgctcctttttctgacttatgtaagtattgcttacaagtcatataactccatgatcagtgttactttgcattcttaaaggaggttttaagaaaagcatggttcctccttagctctgtggaaggatttttgttgtcctggagtagtgctcttgcctggtttttgcttctgggaactggtacagcacttgttgtcttctcagctgggcatttcccagcttgtgatcacttgttgccaaagaaaagacacacagatcctgaagtcattaggaattgcacttggctggagctcttgaggacccttgctcccaaatagtgtttgttgggaaaagtagctgacacttcctgggccttgaggaagctctcaggactctgcctactcccttgagggtgcacacatgctgatataggaaagctggcaacttttgccctgagtgtctttcttaattgtcatctaggtttcttaaatttcctttgattctttggtccccccacaaatcctgacagcagacatgatttgggagatgttggccgtgtgacacagctgtttctctttcctgactgtcgccttttctgagtctgatcttggaacagaacttgaacctgggattctgagattttaaaaaacgtttttgtttagggttcagttaagtggtggagtccttacagatcttgtggcaatccttggaacactctcttgttattgatttttaaagaaatgctgttataccatgcagcagtttatttttaaaaaaagctgcgtgcagtgctgacagagaggtaccttatgggtttccccggcactaacctgacatggcctggggcctgtgaagtcagcagagcacaagttgcagtcccctcttgggaaagtgactggggtcagactttaggatctggatggatcagaactgtatctctgactccaggtatcagagagcctcgctcttttccagctctttcatcccttcctgctgctcttttttacgaggtggtctccatcattcattaccatctgccctgtgtcagatatgacatggtggtgaatgttctagaaggaatttgggagagagtgctcagagaagttctagtttagagcagagggcagctgattgtcatgacgcacgccagcgaccgaggtgcggatgcagagccctcccaccaaagagtgagcagtgagacaaggtaaagccacagaggatcagcaggttcccacgtgtccaagtggtttaagggagctcatgtgatggactgtaggcaggaggggggctgaagttggggttgagtccccactgcacagcccattgctgtgtgagcttccccaagctccagttccctgctggaaggatgcagtgaggactgctgttctaggtcctcggtcaacaaatgaaatacagttgtcctgagatgcccatcgctggcttctgccagctacactttgtgtgctaatttgacgtggtgtgtgcagaagaacccatgtaagttttaaacaagggcgggggtgagcttctcatcacagagagttaactggtctgcagcacagctttgtggtgagtgtgaggctcacacagtagaaccctgtctgcttaagtccacgagacagcaagggaaatgggagttcaccaccgctaaatcacacacttccagtctgtgcctgacgaacagtagctctttgtttctttcctatccctggcttccagttctgctcaggtctgcaagcagagccccgtgtcttcatgtctttaaagcggcaggtggtgtaaagttctcagggaatgctggtcggctgagtggaacttgggatgctcacctggcaagccatctctcatccagatggtctgttaggaccctcttctaggtacccaaactcctttatgtgtgatctgtgctgtctttttggcttatcaaagcctgtggtaagcaaatgttgcagaagtaccaccacagagacctgtagagcagattgtctttctgtgaaacagctgttttgccgaattccttgccttcctaagggttgaaatgaccttaataccagtggttcatcaaagttggcacctggacgcctctgcgcagacatacgccattcagaactgattcacatgtttttatagtcactgcctggttttcaaaggcatttgagccccgttggaaaatgaagtgtgcctcatagcctggaaaaaaagtgctgcgtcttgtgctgttgcagaaacagaatttggagtggaaagagcatttgtgacccatctctaaagcatacacctgcacagagtgctggtgcctgcccgcatgcgtgtttgataggataccattgaaaacacattctatctttagagacatatttattaggaatggaactattggcaaaatcttacaaagtttgacaggtggtcagtaaatcagcaaaacggaccggaacttccttgttttgaacactgctgcacactgctgccttttgtgagctaaccagcctgtgagtgtgtggactgccaccaatgcatcctcccgtaattagctcctggtttttccagaacagaatcaatttccctggctttggaacctgtgcatctgttgggggaaggtggttagtgctggtgttccaggtgtgaggcactacacctggcttgcatctgtttattattagttttgtattattttaattaagaaacctgggttgttaactaatagaatcattcttagtagaaagtaagcatttttagagtttgataaaagaagcaggacgtttggtttttgtaaaaactgctgaagaatttgctctttttatgtcatttcaggtcccattactatggcagtgacagctggggcagcaaccacctttcctaaaagcaaccatactctcagctgggcatttcccagcttgtgatcacttgttgccaaagaaaagacacacagatcctgaagtcgaagagagagaaaccaggtacagtaaaggctaaaggtttgttggttgtctgtgactggacgggagccctgccctctgttaagttgcctggacctggttgcttgtttcatttcctggtttccagagtcttgtgtacgtgtgctcacatcacatgtcagttgtgtttaacacagatctttccggctgtggcattgtggtgtgcctttgtgctgtcctttggagagatggctttagaaattgctgacgaatgtatagcattagtggtgctgtgttgtattaatgggaatagagaaaaataatggctgtcattttgcctcagtgaaacttggagtttggtaaggggaactggtgcacacagatgctacatgagagagcggggagtggcagtgtggggaccaaaatggacatgtgctttgaccgcccttcccacacgacagtgacatttgaccaggaagagcattgtgcacacatgttaagaggaagaggaggaggcatagaatgggatgtaccaggtcctgacctaaaaaggagcttatctttcgttgggttctcatgagtagcagatacaaagactgtggtacttgagcctcaatccttgaccccatttgagtagattcaagagtgttagtcttctgttgtataatccaaagctaattaaggatgagttgtccagatccatagttaggaaaaaaccaacactgtagacatgaaatgctgttcacttaagaatgagaggcaaaacgtgttccatggtcctcgttaccatctgcagccccattggaaatactcagcttaacttcacattaaaaaaaagaaaaatccagagagtcaaacctgtctttacccagaaaagcaaaagttctgatcagtagttattgccctatacatatatgacttttcagttttcaaatatatgtgtctgccattggactctctcctgagctgggaacgtcattttgtactgggggataaacagtaaagctttggtcagtatgaaaatgctaagtctaagtatctcaagaaagagtcctgaccacagtgaatagctgaatcttggtccaatttgaaagattttcttagcataatgtgcccattgattggcttcaataaatacctgtagttctcaaatggaaataggaacacatttagaaagtctaattattttttctttggaaaaggcagaagaaactagaagtggccatggaggaagaaggcttggcagacgaggaggtaacgtaaccttctgtactaaaccatgtcagccgattgtgtggcttggctatggtcggtttctccatctgaatgtggcttcttactgtgttgctgtgtgggaacctgaggaggagatgggggcctttgcccccaggagcatcacatttgctgaataccatccacagcgttctgggtgtgcaggacaggaatgggctctggataccatctgtctgtctgtctgtccatccttccttccatccacctgtccatccatccacctacccacctacccacccgtccacccactcacacatctgtccatccatcgtgttctgggtgtgcaggacaggggtggactctggataccatccgtctgtccgtctgttcatccttccttccatccacccatccacccactcacccatctgtccatccatcgtgttctgggtgtacaggacatgggtgggctctagaccttcttgtcgattccctcttctcacatttttttccctgaatatttttttaaacaatttactccctaatttaggctgtgcatcttgctgataaatgtcttgaaatggtctcttcctcctgtccctagtttttctgtactcagaagtctgctaactgtccttcctgcctgtgatggcttcagtgagatgtcatgccccgtgcacccaccaacccccagtctctgtgtttgcttgcttgtggtactgtgttatagtagaagagtagtttacgtgatgcagtacaggcttctttctggtggcctgtttctctctagccttagctctcggcatgtcatccagccttgaccagtacccaattgctgtgattttttttttcctgcttatctgtggcccttttcatgtgctatttctgtctcttgaagcactttctcctccctaacgtctgacttccctgggaaatcctccctcatggcttagccacttgtcctacattctacactgacggtttctgtacttgggatagcctgaaagcaccatctttccagagaggctcacccaaagcatgaagaggccaggaaataaatatgtgtttttaagatcattcgtgactactttatccatggtagaatgggtaaatccactgtttcggtttttttgttttgctttgttttgttttatttttttggttttatttttttggtttttcgagacagggtttctctgtggttttggaggctgtcctggaactcactctgtagaccaggctggtttcgaattcacagagatccacctgcctctgcctcctgagtgctgggattaaaggcgtgtgccaccaacgcctggctaaattataaatttagggagaggttggttaccagaatagaagcccccgctgagcacattggagactctgttcattgaagaacagcctgcagtatatagcagggccctgtctcggggaaaaggaaggaaatgagggaagaagaggaggaagaaatagttgggttttttgttgttttcttatattgcactttatattaatgaagacctgtcagacaccaagagctcagatctggcatgtcagatgacagattgcaaaacagttgcccctctgttagcccagtgtggccaggttcctgttgtacgagatctagaagtctggacttttgcataaaaaaattttaagctgcttttaaaaatattgccaagtggcaggcagagaactgtctgggaaggcctgtttgtagcggtcatggcgccccctggtgggcactaatgattttttcttaattcttgtaaatagctcttagaaaatgtcacattgttttgcttctaaaagtcggtggttcgtaatatctgtttttaaacgttccactttttctgtgaaggtattttaaaattcctatgtgtttattgtgaagctcagtgcttgggctttgattatgttgtgtgtaaaacaattctcttcaatgttagaactgtcattataaggagttagaatttcttgtttcttaaaaaaaaaaaaaaaaaaaaaaaaaaaaatttttctcnnnnnnnnnnnnnnctcacgaatgtgtgtaggtgtggggtgcatgtggccagaggacaacctggggtaccagttctcagcaatactgtctttttccttgttgacctggagctcactaagtaggttaggctgcttggccagctgacctgtttctgcctccccagtactgagattataagtgtttgccacctcacctggcgtgtttgcataaatcgtggggattaaacttggttctttgtgtctgcaagataagcactttaccaactgagctaccttcaagcgtagtttttcagtgaaagttaatacctttaatttattctgtaacagaaaatggtctgtgcagtggttcatgagtgagccgtgagatggttaaactgtgtgtggctgtgtacagcagtggctgacaggaagctgttagctaaaccctttaatagctcagacctttgaaatatcctgactgctttagagacgcctgggcatcctgaagattgagaatctgatcatttgaagaggaaaggagtctttaatcccagcactggggtggagacggggagtcaagagaattgccagctacaaaatgagattgcctcaaaacataggggaggagatacgctgattagcaaaagtcatccaaagtagaagtttattaatgggaaaaccaaaataattgatttaagctgcagaagagagttgtgtgaagcagccatctgcctgcaggtctttcctgaggaggggaaagtccgggttagcacagggatcttatttcagttcactctgagcaggtacagtgggtcctcagttaccaccgggctgcagtgctgactgcagtgctgtctgaagagctgacctcactgagtagggtgtcctggggctggtgctctattcggaatgcggtgacgcacattgtcactcctgttttgtcgctggagagctgtgttcctgcaggcgtgagaacctgtcagatactcagtgactgcaattttttggtgctattgttagagagttttttggcagactcttgtctgtagatcataagcacatcttatgaaactgcagccaggtatcttctgttgggatgagacaggtttctgtagctaaacactactgtgctattttgcagcagtgagaaggacaaattcagaaccatcttccacagtcttgtgttcatttattgtgtgtaattagacatcaaagcaggcacctttttttgccacagggacacaatgctacagtgccaccaagtgatccttaaaagatagacctcgagttctgggacttaaaaccagccaagtctcagagctgccaacccatgcacagagcaaatttgatcattatagattaactactaatctcatgtcttagttatacattgcatttttaagtgagctacataagcacaataccccaaacaagagtaaaagcatgtataacccaccaaataaccaacaatcaccccatctcttgggaatgtgggtatcatgttctctggatttcttcctgttgtctgtgggagaagtcaactttaagggtccctgcaaaaattgggataatggtcaagtcctgggaagaccagctgtaatccttgttgatatattgtaatggtaagtctttactccatctgcctgagtcccgcctgcctccacattaaggtgtctcgcgctaaccgtctcgccagcaaaaaacgacacggcacactcctcaggatccttctgcagtaaagctttaatgcgtcttgagagggagagcatcagcttacagagcggagactccgaactcccaaaaacccatcccttagccgcctcagaagtgttactccctgactggctgaagctcgtcggaccatatgacgttagctgatcggaccatatgacgtcacgggagaggcggagaccaagggatggaaagttacaaagttacctagtgcgcatgcgcactagcttgtaacggctccttacattagggtcccaagtaacacacagagacttatattagatacaaatgctgcttggccaatgactaggatttctcatctgctagttcagtctttttttttaatatattttttatttaaattctttaattaccactcatatttacatatctacccccagctagttcagtcttttttttaaatatattttttatttaaattctttaattaccactcatatttacatatccacccccagctagctcagtcttttttttttttagctcagtcttaattatcataaatctatatattgtacaagccttatattatcaaggacaccttccgctggcaccctctcttgccagtggatcacatggcgactccagagcagagaccagaggaagagcaagagaaagagtatgacttcctgtttgtccctgcttatatatgagtctgcctgtatcacaagacttctttttactacatttcccagaatcctccctgacttgctgcctcattggttaaactttattcaacaatcaataagaaacatacacaggaggaccttccccatcaatatatatgacctgtcaagattcagtatgtctcccctgatcaaacctgatccatatcaaccctgaaggaacccccagcttctcatttcctgtggaaatacaagcaaaaactcttcttcaaagcaatgcatttttgagttccatcttaaagttaattactcttaaaatatctaggctggtttatttcagcatcctttcaaccccatgtctcttagcagttgtcatttgcttatcagcaatcaaaaaatttaaggtcaatatagcaacacactggatccagacagactccctgtatttcccattttaacgtggcttatttttatatatacatatacatatatagatgtgtgtatatatgcatatgtatatatattgtatatatattactttacttctctctttaaagactttatttttaaactatttctttctatgactgtctgcatccttcttttcctatgcctgtgcacattattaaacacactggaacctgtttagagggttttttgttttgtttttcctgtctggaccttttttactgcatatctctagtcttttttgactgcatgatcgtttaaacggctaagcagtgacctctgcggctggctttagcatctggctctgccagctttttggatctgtgaaagcaaagcctacaagagctggagacctggtcagaggtgtaacgagagcttgtaggttaagatatctttattcaaataataccggccaagcgcaagctagagcgtgcccagaggcagcaagctagggaggctagagagagctcccacgtgtctgctgccccttaagaatcccccatgtgtcatcctgaacatcccctgaccataccctgacaggtgtggttaagcacatctgtagccagcccttaggaggcatggttatgatgtctccctacacagaggtgcatgactgagaactgcattcaaacccagagctctagaataaaatgccgaagcttgcattatagcatttttttgttttctgttttttttgttttcttagctttcccccctccttattatactggttgctcaagggcttgctgtaaggcagaaccttttaaaggacccaggtccattttttttttttttttaatttttcaggtgctgtggacattcgagcttcatgttggtatttttattttttgctctttgggggcccgccacccagatcccaagtaaacacatggagacgtcttcttacttacgagtgcccagccttagcctggctggtttccagccagcttttcataagtcatcccatctaccttttgctctgagctttcatctttctcttctctgtatatctttacttccttcttattccatggctggctgtgtaggtgggtggctggcctctggcgtcctcctctcctcctctttgctcttctatttattctctctgcctggcaaccccgcctatcctttatcttctgcctaactgtgctgttcagctctttattagaccaatcaggtgtttcagacaggcaaagccacacagcttcacagagttgaacaaatgcaacataaagaatgcaacacatctttgcaccattaacatattccacagcataaacagatgttcaactaatattctacaacatatagatgtgcttttagctgcattagactatttaaagggttaaagtttcccaaaccccaagataagtgcagtcttattttttaagtaacatatataaaacagtatttgctatttgctatatcttcatttcctttattacctggttcctatccaaaggtgtacacacacacacacacacgcacgcacgcacgcacgcacgcacgcaagccagccagccagccagccagccagccacaaatcaaattggggactggagagacagcttagcaattaaaaacactagctgttcttgcagagggcccagattcaatctataacaattacatgacagctcacaaccatttgtaacttgagtttccagggatctgacaccctcccctgacctgtgaacaccaggcatgcacacggtgcacagacatacattcaggcaaagcatccttatgattaaataaaatactaatgtagcttcattgaactgtgtgaactgaagacattccttgtttccctcctacctctgctacgagtattagaattctgttttgatgatgtgcagacttaattagacacctaacttctagttagacacctactactctacaacagacaaacaggtgcaggacaggtgagtggctctgctttgagctgctttgggagcagtgtgtccaaactgatgggagtgctaggacttgagtccctgacctcaaggttgataggatcacttgaacatgagtaggggctcaatggttttattttccagtgtgtgctgcctctactgggaacaatcactgtgtcatgaacttgatttttcttagatgaggagtcaatgaggttagaacaagaaaatgatttccagatgcagcctttgggtatttcaaaatgttgcttattaatagttcttattttgttatctttgcaaatcagagtattactgtaatagtattgactcggatggttttgttttgtttgttttttttttaattggttgattggttttctttcgtttttgatacagggtctctatagtcttggctgacctggaactcacagatccccacctgcctctgcttcctgagtgctgggattgaaggtgtgtgccaccattcccagctaacttgggtattttaatgctactttgtaattattattttgcaatttcatgtcgttggaaacttgtatgaagttttgcgaaatttgctgaaatttatgcaagaatgggtttcattttttaaagatgttatttatttatttatttatttatttatttattatgtatagtcttctgcctgcacaccagcagagggcaccagatctcatttaaggtggttgtgagctaccacatggtttctgggaattgaactcaggacctctggaagaacagtcagtgctcttaacctctgagccatcttttcagcccaggtttcactcttaagtaaatctccatgggaacactgctgctatgtgacttctgcaggtcacagtagtggtgacagcaccttggaaagtaaagaattggagccagttccctgacagtaaaaacaagtgtcagaggaagcaagcagagcctggtgatggatgcctgtgaccccaacactcaggaactggggcaggaggactgccttgagttccaggcaagcctgggctactcactgagatcttgtctcaaaaataagtaggtacacacatcccagaacactcctggcatctgcactgtctaagatttatttttgttagttaagttaccattcagaaggcatcaacttacacatacaataaactggttaaggtgatgcagcccataaagtctttcaaggatacagacttaataattgttttaaaaatgttttcttaatactattttattcttcccttgcttagtaaatacttgacttgacaagtagattatagacaagcatataataattaaggtaccatacctccatccattcacttctttaaaattatatgtgtgtgagtgagtgtggatttgtgcatttgagtgcaatgcctgaggatcccagagtcacctgatgcccggagctgaatggatgctggaagctgagcttgtgtcttttacaagaacatcacacatcttagctgcagagacttctctccagtcgctatgcctttgtttcttgttgctttgttttgttggttttccaagacaagctttccctgtgttgccctggctgtcctggaactcgctctgtagaccaggctggccttgaactcgcagagatccacctgtctctgcctcccaagcgctggaattaaaggcgtgcacccccacggcctgtctttgtttttatgtctgttgtcttttaacattacacatgcctttgagacagggttactttaaaatcatctttttaaattctgtttttcatagaaaaagttacgccgatcacagcatgctcgcaaagaaacagagttcttacggctcaagaggaccagacttggcctggatgactttgagtctctgaaggttatagggagaggagctttcggggaggtgagctgctttgttcacatcaccattgttgaaagtagatgttgtatggtgtttaaatatagttcgtaggctccgaggtcataggtcagttggtaagagtgcttgcctagtatccacaaagccctgcctttgactcagcatcatagaaaccgggtgtgatggcacacctctgtactcctagcacttgggagatggaggcaggaggatcagaagttcaaggtcatctccagctacataataataagttcaaggccagcctgggctacatgagatccctgtccccccttaaatgtgtgtgtgtgtgtgtgtgtgtgtgtgtgtgtgtggttcccactgttcagcgcttgcgtttgtgctccaggtgcggctggtccagaagaaagacacggggcacatctatgccatgaagatcctgaggaaatcagacatgcttgagaaagagcaggtgtgtctcccaacatgtacagtgccaagggcctctgtgagagggagggctcagggcagtgttgatgctgaaaattataaaagagacctcgtttactagatggtactgaatttatagtctggtgttttcagttgttaagttcagagttcagtctttccaactttacagcctctgtgttagtttgctctgttgctatcagaaaacagcaaggctggggctgtgaatgacaaaagccattactttctcgtggttctgttcaagggcagaaagttgggtaggttttagtttctgatggttgctgtcttggctcccttccttcaggtaccacactccctgtccttggtgaccgcaggaagagcagacacaggctccctgagcactgctgctgtctcctcctgtgggccctgtcacagtggaggagaatctgctggctctctgctcaccctcgaggcttaatgaaataagataaaaacagcctcctgggttctgcatatttagtgagactttctgggtcaattgtcttttcaaaacatattcatctaggtggctcatatccgagcagaaagagacattttggtggaagcagacggtgcctgggtggtgaagatgttctacagttttcaggacaagcggaatctctatctgatcatggaatttcttcctggaggtaaatagcagtggcagacagacctgagctcatttgcatacgtaataagttcatctgcatatgaagtaataatgtcacccagttttactgctgaattttattgagtgtatacatacccatcattttttttagtatttacttccagaataatggaagatgatttggccacaaatcatgtaatttccaaaggactgttaggatgaaattttattttatttattattattattattattattactattattattatttgggttttcgagacagggtttctctgtgtagctttggagcctatcctggcacttgctctgtagaccaagctggcctcgaagtcaagagatccgcctgcctctgccttccgagtgctgggattaaaggcgtgtgccaccaacgcccggctaggataacattttatatattaccattttgtgttcactgtagagttaagggaagagagcctgtatgcagaaagacagaattctggtttctaggcgtgcctgttcactcttcgtgcttctaaactctgttctggccctgataagttagcatgctccccacacacaccattgcatgcacttggtgggttgtttgaggtaccgggcaagtcataaaaccgcaaatatgacacagtctgtacaaaggacgtctgaagagggtctcctcaagagggtgtttgctgcgcactcccatgatacagcaccagggctccagacagttactgatgtttatgaacggacctgcgcctgaggcttcggggtcactgcctcacagcagcaaagattaaagctgttgacggctgtggggagtaaagcagaaggaggatgtgagagaagacagaaattggggtggatgcaggaaggtgaggcgagtcacctccccgttcgcagtccctcggtgcttcgccctgtgcaggtgacatgatgacgctgctgatgaagaaggacaccctgacagaagaggagacgcagttctacatctcagagactgtcttggcgattgacgcaatccaccagctgggcttcatccaccgggacatcaagccagacaaccttttactggacgccaaggcatgtgaggaacgggagagtccttgggtttttcatgccggtttcttggctgcagacagcagccgtggcttgggttgttttggattaactaaactttttcatagatagtacataaatggctgttctggagtaacatcacgggaaatgggttacaaaaaaaaaaaaaataaaactccctgttttctgtttttaaaaatcatcctcagacatgtataatctcaaatttttagctgtatgtgttttaagaatttttataataatggcatcagagtttatattaaggacttttttgtcttcaaagttaacatgacttcactggaatttgttgttgttttagggacatgtaaaattatctgattttggtttgtgcacggggttaaagaaagcgcacaggactgaattctatagaaacctcacacacaacccaccaagcgacttctgtaagtttgcatttttcctttggttgaaattttgtagcttggaactttagtctgagccagaatgctggcataccttcctgagttgcctgagctttaggtgtaggtgtgcagttgcatcttttgtccatttcccctctgacggtcgtggtgtcttgttggaattagcgtttcagaacatgaactcgaagcgaaaagcggagacgtggaagaagaacaggaggcagctggtgagtcctgaagaatgctgtccccctgggaactcgaggtgctttcctcagtagctccgactgcacaggtggacagggacggggtcaccaaaggtcaactgggacagcaaccccctcctgcgttttctgctgccagtgaagattaaagactcagacacttgtgggtgtgaacagagcgcagtgtgttttatgacggaggtttcagaaaagtaagaagctcaagaaaagagagaagcttcctagagtggtatcggggttcctgagagaaaaggctgttgagattcatccgtaagggctctgcagacactagttgctgaggctggccagttctctgggctgtcatgggctgagcctgtggaggaccacactgtcttggcccagccaggagctgatcatgagttcttcacatgctgcccacccagttagttggggtgaagcctcgctgtgtctgtctgtgactccagctttattagttattgcctgtgactgtctgttgctgtcgggcgtttcaccagcctctgtcctcctgtctgtgattacactaagctgtttgttcccacaccacagagaagaagctgcaattaagcttggttaactgtcattgggatggtcttgggtgtccttcctgagataggtgggttttcttgatgctgtctctacctaatctgtgagtgagaagcaagcagacataaaagagcagtagagtccagtgtacattccagaaggagagggtctcccggagctgcagccaccaccaacactggcctttctttcagatcccaagtctcttttaccaggtccccttggctagctcataaccagctgcaagctctgtttctcatcctagtgtttctgatttggctgtttaacccatacctccttttaactcttgtctgttttcactatggccctatccccttacttcgtacagagaacagggaggagacatcacctcctctccatagccagcgttctcattgcctggggtggtgtaactcctgtaaccaatggaacaggaagcttggggtgttggcagtgacacagttgtctcaataggcaagcctagcccctaacgttgaattttatggctgtttcttttgttgttgttgttgttgttgtttaagatttatttattatgtatacaatattctgcctgcatacatgcctgctggccagaggagggcaccaggtctcattacagatgattgtgagacaccatgtggttgctaggaattgaactcaggacctctggaagagcagtcagtgctcttaacctctgagccatctctccagccctggctgtttctcactaatgccatttccctctttttttagtgaatgtaagacttgctttcctccctttcctgtctgcatttgtatagttaactgaggtgtgaacatttgcaatcaggagtgtagctttgactttgtcttcctggtttcttacacagtgcccagcacatgcagacagataccttgtcagtatttgttgagttcaagtaagcaatgatgaagctggggactccccgttcccttgggaaatgctagactcaggtgacaatagcctgccatgtccaacacaattaaatgacattttgcatttttgagttcatttggtcattggtccaattagcagcaaacttcatattctgataaactttttaaagtgtgttcatctgttggttaaggaaaaaacttcattctgtttttgaatgagtcgttttagatcagatgttacatttgagaaaatactacagtcttcctgtttttaaaggcaaggggacaaagcttgaggggaaccttggcagattccatgggcgggggcaggcggggaacaaatacgccaggcagacagaacttagaagttttattagaacggggagggagtggaacggaaagagaaaagaggtgaagagacagagacagagacagagagaggacagaagacaagagggagacaggaaaagtcctgtctgccccaggggaacagctggaaagaatgggaaagagcataagtgggtggggctctttcttttaaaggggtcctttgtacctgtgtgcagactagcactcatgggaccctgggctgagagcattctgccaggtgataggggcataatgcctgaatccttacaaataccccttaaaaacttgtctgaggggctggcattggtgctcacctgaaacccactagttaagaggctgaggcaggggcatcctgggttctgagaccaacctgggcttcacagtgagaccctgtcttcataaataaataaaagcatggcagagggtttctgtatctcctaagagaaattgtcgttggtcagtggctcccgaggaagaagcagcgatgagttcatcaatgtctgggtcaggagattccttcagcccacccactgcaggtctcattgtcccctggtccctgaagtgacgtcttctgtcccacttttggtgatttctacaatagtgcccctgttgagagcagctaataatggttttgtagaatttgatgtggatcaaggggaaggtgcacagagcccctgacgtaactcgatggagttacgttctaaggaaggcagcctgtgagcgcgctttttgttgcggcctcagatcaagctgctgtaggttctcccacctggatctttggtgagcagaagctgaggctcagagagcagctcacatgagtagtgagcagaagtcagggccactggacgcagccttttcctcccttttgaagtagaagaagggtctctcctcagcccagcatcctgtgttctgtccacagtgcctgactcagcacctgtcagtcagccttacatgtgacaccctgccttacatgtcaccagtaagggggtgcttgtcctgtgcttcttcctgtactaatccacactcagatgttgtctgagaggttcagaatgccagtttgacaggatgctgctttgtaggcatattccacagtcggaacaccagactacattgctccagaagtcttcatgcagactggctacaacaaactgtgtgactggtggtccttgggagtgatcatgtatgaaatgctaataggtgagtcctgtttacatgcatgatacatacctctattggcagatacttctattggtacatacctctattggcagatacttctattggtacatacctctattggcggatacttctgtgacagacaaaaatagcagagccatttttaatctattccccaccttcttctgcccaggatccctatggcttcccttatcggatgccatatgcagggttcggataagatgaggtggggctttacatccttatggacttcattagtagttttacagtaaaccaacacctataagaaacagatgtcgctacagaacactcaggtttttttctcgtggcgtgtacttgtaggtctggttgaactgatcaccaaagctggtaatttttgtttccctgacacccaggcttcccacctttctgctctgagacacctcaggagacatataggaaagttatgagctggaaggaaacactggcattccctccagaagtgcctgtctctgagaaagccaaggacttgattctcaggttggtgacttaaaacttcccagtgcccacacgagctgtttctctgaggcagggcaggtgtttgggggcggggagagaaattaatttttatgtttaagtgtgttgggtattgctcatggaggctaggagatccctagagctggagttacaggcagttgtgagccacctagtgtggtttctgcgaattgaacccaggtcctctgcaagagctgccagtgcatttaattacctacttctccttccctccaaaacgccaatgcttacaaagaagtttgtgggaaagcggggtttagatcagagaagagatcttcttggacatactgatatttttagcaaagggtcacttctgttagacttcaggactgggtgtgtcagaaacgaaaggagggtaaatgtattagaagcagaagcccctgccatgaaagtcacaggcacctaagcagagggcggtgggaggaggtgctgcagcactcctgtgaggggagaaagagctgttgtaacgactctttttctgtcctccagccagctcccaaataatgacacagactcctcattaatgaaagctcggcctgtagctcaggcttgttcctaactagttcttatcacttaaactaatccatttttattaatctgtgtttgtcctgtggtatttacctctcttcttgtttcctctccgtgtctcctggtttcttctgcgtgtttagatcctcccctcttcctctctctccctgggagtcccgcctgtacctcctgcctagccaatggccattctgctcttattatggcagtcacagcaatgtatcttcacacagtgaacagacatccccaacaggatatgaactgtgacaagccttgtcagtggacagctggcagcgtactgtatagaattgttaaactatacatggcctttgaccagcagttctatttctgggaatttaatagagcgtgttaccatgtaggagcaaaaagagttaggcacatttcttgtgttattttagttgtgaaaaattggaactcacctaagtcttcagcagcatcgatggatgtaacactacgatgtctccatacacaggtctcaaaaaattacctcacaggaaaatactgaacagcgctgcgaagttttcttagtacattaagtgataaaagtcttaaagtaatcatgtcagccctgttttaattatttcaagcaatgaaagaagtgactgcagaatgtctgtgggtgattgtacttctccatgtttctcctaccccagtgtactcaatcactaaattagaatgcttcctagaaacacttgaagggatacaatcagagttgcaagtgaagtatgtggctgacgtctgttttcccttcctaggttttgtaccgactctgaaaacagaattgggaacggtggtgtagaagagatcaaagcccaccccttctttgagggtgtagactggggccacatcaggtatgttctgaggcctgggctgacaaagggagcttctggattggtggttaatgtgcctctgattcttatagacccgaggttctcagcctgtagttcatgacccctttgcggggttgaacgaccttttcacagcaatcgcctaagaccatcaacaaacacattcataacagcagcaaaattaccgttttgaagtagcaataaaaatggttttatgggtggggtcaccacagcgtgaggaactgcactaaagggtcacagcgacaggaaggttgaaaaccactgttatagacgaaatacaagaggcagctctgcctcatctgagacgtcatagacttggtctgctgctctgcttccctgtgtctgttacggaaaggtcgcagagcagagcctggcctgtctaagctcagtgctagttggggacagaggccaaggttgtggctctttccacccagttgagtcttaactagacttccatagtcatcgtgcctgggtctagaaagtctaggtaagacaccatggacaagatgtcaacagttcctcaggggaagatgagaaatgtatggtgtgtgctcatgaaagtcctgggcacacagtgggacctctagtgaaggcgcatattactcttagttaagactaattcttgtatagacacagacagtacgtgctttttcatagtgtggtaggcttagcacccagtagatcctttaaaaatttgttgaaaaaaagtaaataaaagctgataaagggcctttgaggtgattcagcagggaaagcctggagactcagttcaatccccagtcctgcgtggtaggaggagagagccaacagctgaatgctgtcctctgacctctacacttgtggggtttgtgtgtgtgtgtgtgtgtgtgtgtgtgtgtgtgagagagagagagagagagagagagagagagagagagagagagagagagagagagagtgagtataacttaagttttaagtgtaatttaaaagttttaagtgatggtttcttttaactatttctatagttaaatgtatctactaccataaggcattttttgtggaggtattttttttaacctaacctctctggttctcttaaaatttatatgactgacaagtttttgcattcggattttatcactgacatgtatgtgtgccctcttttgcacaggctcactaatcctcactagacttgtagccctgactcacttaggtagatctcactgtctccacagactccatatcacctataaatctcagtgagatgccgtgtctgagccagaatgctggcatacacctttaatcccagcacttgggaggcaggcgaatctctgggttcaaggccagcctggtcaacagagtgagttccaggacagccaaggctacacagagagaccctgtctcaaaaaacaaacaaacaaacaaaaacccaaattccttctcttctaattttcctttcattgggtcttgttttttttcaccttaaaaaaaaaatatgtcttatctcagtggtagagtatttgtccagctgttgttcagtctctagtactagatggggaacactgggtgagaaagtcttcatgcaaacgtgtaaaaattccaagcaaataaagacattttagtgaaaaattactcagccatcttgacatcatccgcatagctgtgttcagatgcgtagcaggcgcccttgggtttcctgtcccatgcagtggtggacaggactttcaagaatggtttgttggacagtgaagagttaagaaaacttcccatgctctttcagggaaaggccggcagccattcctatcgaaatcaagagcattgacgacacctccaactttgatgacttccctgagtctgacatcttacagccgggtaagacaggttcacagcagacctcacacagcagtcacctgcaaggtgagggacatgcagctagtgacgtccctctgcccttcttaactcttttctctttccagtgccgaataccacagagcccgactacaaatccaaagactgggttttcctcaattacacctataaaaggtttgaagggctgacgcagcgcggctccatccccacatacatgaaagctgggaaattatgagtgatgttcacagtcacccacagccaagaactcaggtagctgcatctccaggctggatggcatcagcaccagacattccgaggacgctggcgctcaccagcctgagaaacttccacagggtcggattctgagactactacaggaatcgctcggcttttctttcttctttttttttttttttttttccaaatattttgttgtttgtattaactttattatacaaaggtactggaacaaaaggaaccgacatgtcctcctaactgcactgcccacgtgcatgttgaggtccactctgcccatgggctgcgcttccaactgcaacactaatccagccagaactgcacagcactgacggcagcctgcacagcgtggcagcctgaggtcactcacccttggtgtacctgcttcactgcaaagcgtgtgggtcttgaatcagtaaaaaaaaaaaaaaaagccatctgtagctgctgttagaacactcgccctgttggtttggacattgtaggctccgagtgaagacagtttctgtggcggtcctaaggaacttagggagaagaataccgacttcaacattagaattccctgccaggtgctcacacagcccctgggagagcggcggtgagcttcggtcagggtgaggacgtatgtctcacctcactccagcatcttccaaggctgacttcgctgagaagtagtgacgactgttttacacacacggggacacactgctgtgattgagcaagtgccagttacttttattgtaacacaaggacttcttttataacaagaggatggcattattttaactgggtgatggtgagttgagtttcagaaatggccatgaaagctgcttgtagaacctagtgtatttttattaaactatttttttaaatgttaaacttccgatcatgtcaatgaacacatagagaacaagcgtgtgagtagtcactttggctctctgcaaagttggtacatgtccttgctgtgctggtaggcaacctttgtgccattgttttccagtgaaccaaagctcctgagcagtggctgtcagtggcgagtggaattccgcttcccagggagcgctagacgccacatgacagacctttgacagggtcgtgttcatggttagctcatcactgtggttaaagcccacagtggagtgaaggaatcgggtgcaggctgggtgtgtgtgactggagactggacaggaaaagtcagcatcaaattccctgggcatttccctagtggtgacgtcatcttttcttgctcagcgttttgattctaaaacaactctctgaagaggtttagtttcctaagttgtagttgagaagtaacctctcagtgaatggcaaagatttaccatctgcgatggagatggaatgaggatttattgggaggaaatgtctctcctcgggggactgactgagtaatgcgttgtgcaaatttccaaaagctttttttttttttttttttttaactttnnnnnnnnnnnnnnnnnnnnnnnnnnnnnnnnnnnnnnnnnnnnnnnnnnnnnnnnnnnnnnnnnnnnnnnnnnnnnnnnnnnnnnnnnnnnnnnnnnnnnnnnnnnnnnnnnnnnnnnnnnnnnnnnnnnnnnnnnnnnnnnnnnnnnnnnnnnnnnnnnnnnnnnnnnnnnnnnnnnnnnnnnnnnnnnnnnnnnnnnnnnnnnnnnnnnnnnnnnaaaaaaaaaaaaaaaagccatctgtagctgctgttagaacactcgccctgttggtttggacattgtaggctccgagtgaagacagtttctgtggcggtcctaaggaacttagggagaagaataccgacttcaacattagaattccctgccaggtgctcacacagcccctgggagagcggcggtgagcttcggtcagggtgaggacgtatgtctcacctcactccagcatcttccaaggctgacttcgctgagaagtagtgacgactgttttacacacacggggacacactgctgtgattgagcaagtgccagttacttttattgtaacacaaggacttcttttataacaagaggatggcattattttaactgggtgatggtgagttgagtttcagaaatggccatgaaagctgcttgtagaacctagtgtatttttattaaactatttttttaaatgttaaacttccgatcatgtcaatgaacacatagagaacaagcgtgtgagtagtcactttggctctctgcaaagttggtacatgtccttgctgtgctggtaggcaacctttgtgccattgttttccagtgaaccaaagctcctgagcagtggctgtcagtggcgagtggaattccgcttcccagggagcgctagacgccacatgacagacctttgacagggtcgtgttcatggttagctcatcactgtggttaaagcccacagtggagtgaaggaatcgggtgcaggctgggtgtgtgtgactggagactggacaggaaaagtcagcatcaaattccctgggcatttccctagtggtgacgtcatcttttcttgctcagcgttttgattctaaaacaactctctgaagaggtttagtttcctaagttgtagttgagaagtaacctctcagtgaatggcaaagatttaccatctgcgatggagatggaatgaggatttattgggaggaaatgtctctcctcgggggactgactgagtaatgcgttgtgcaaatttccaaaagcttttttttttttttttttttaacatggctgctggatgactcctctttgatcaaaggccatcaccagctcttgaagtgttttgctgagtttctgtgtctggcaagtactaaccacttgtcagcctaccggctcaactgtagcctgagcctgtgaccaccgagtgtttggagagagcagactggacacggtggatatctcatctcactgatgacttcaattagctgccttaatttatgcagggtatatgagcttctccagctcacctatttcaaaagtatttagcagcaggaaaccgccccctccccaggctgtaaaatgggactgtggggtgaccaggttcaacgtggagatcttgctgtactctctagctcaggtgcaatatctatctaactaccacaggatgacggcatcgtcaagtccaggtgactggggtaggttgagattagtgtaaagaagaattacccagcttgtgtttccatggtgtagggcgcagcacttcgtctgacctccctgttgtgactggaggaaacagtgaaatgcagtgggaagttggctttgctggagttagcacacaattcagtcttcaggggtttctcgtgaaagcctttcttaagctgctgtctaaaggaaactagactgtgcctgtcccgttgaaagctaaaaatatgagtcagggtgcaatttaaggaaatagcaaagattccccgagattggctttttttccattatatttcccccatgtctcagggggatcatgtaatttaagtgacaaagcctatctaatcactgggaatagtgacattttctctagtctctattttgaatcaaagttttactacaagctctgtggtttgggtttttctaaggatataggaagtgtgtataatccaaatttattagtttcctgttttaatacagacttttgctttttcattaaaacctttgtgttaaagcagttttgttttgtttttgttttttgttttttccagacatggtttctctgtggctttggagcccgtcctggaactagctcttgtagaccacgatggtctcaaactcacatagatccgcctgcctctgcctcccgagtgctgggattatagcgtgagccaccactgcccggcatgttaaagcagttattaacagcgaagtctgcaggtgtgtgaaaccctaggctgtccagaagaagcagtgaccacttagccataggtaactaatcagctgttagtttatcgacagtgtcagttatgggatattaaaatattctttggttgctaagacttaagatagggctcatttattcctgtaacagcatagctttttaacacatgcataactttgtacaagctgagcatttctaaggattttaaagcatgttttggtgttttgatatagaagaccttagaaagtttatgctgtcaggaataatagctacctgtcttttggtggtctacaagtaagttacttgagggtcagaaaagaccctggctacatgatatattctctctttgaattgttaaaactcggaaaatgctaaagcagctgttttgctatggtgacagttatttttcatttcatttcaaattcattttctctgtagaagtgcacttatttctgaaaaagcttatgaagccaacacttaataaatataagacacttggaactactagaaatattttaggtttttattacaaaatatgaacaggtactgctgctttaaaggaataaataaataaaagtgtattgtagttattttttaaaaagcaatacaagtcagcagttgtccagaaccatcgagctccagaggccctcattttgaagactgttgggcatcgagaaggtacagcgagaataaaaaccatgtttctgaaagttctgctggtgggatttctttctttctttctttctttctttctttctttctttctttcttttttttgttttgttttattttcttgttgtctgaagattgttgctatccaaaacttaaatactattttgtgaataaaattaccaaatagctgttacacctaaaagtcacatcatgaaaaggttcaagtatttggagtttgaaccgtattacatttaaacaatcaagacagttgaacaagtctgggtttaaaattgctcagatccatagctgaaaacatacacctttgtaagttgtcattttaggacttcctgggcatagatctgacatgcagtcagtccttccagtgagtcagaccttagtgtatcagtaacctgaaaatcctcatgagttcagagataaaatcagctcagctaccacccactgtcccttcctgtggaagtcacaacaccaggcttgccactgagcccagaaagagccaggcgggatcccctgggccccaggcggcaccactccctcccagccgtgctccacaccatttcaatggcgctgttgtaagaactgtgggaacacagaggtcgggatttgaggagagcaatcttgcagactctaaagtcccactctcagaagtgtccagtgagacaacctgcattcacaatcgcactttcacttacacaatgccctgttttacaactattctgtaaagaaatggcgtcaccaggacacagacaccagagctccaggcctgtacttcttgcttccgaagcacagggtatgcgccatcggcatggtatccccctaacgcccagccctccccgccccccatgcttctagaaactcagagggatgcatgggtgtgatgggtgtcacttggggacaggaatgactgcaggtgacagcaggtgagtagtttcacagtaaggaaatgaaccggtgccacgcagggtggaaagatctcttccagggtagtcagctcatggcagaaacacgagctatgggggctgcttcctttgttacttttgtcacctgtgctgcttttgtccttggtcggagagagctagacggctcaggcttaagcagtcctcacaggacttcaaggctcgattttataagagaacctgtgggttctgaagaatggctgagcagtcaagagtgagtactgctctcacagaggtcccagtacccatgccaggtggctcacagtcatctgtaaactccaggggatcaggtgactgcatctgcagggacacatacacataattagaggtaataagaactccttgccggaaagtgcccccatgtgttactggctgtgatcctgtcaactgcctgttaattaactggtacctggcctggcgttgacttaggagtccctccctccctcttcacggtctccccccccacacacacacacagcccttttttgatgacttcctcattcttttaaaagaaaaacttcaaatttgtattgtgggggtttgtacaagacagtgcagtgtcctctgaggccagaagagggcgtcagaagttcacaggtttttggttatgaacttgcccagagtgggtactgggaacctaacttctgtcttcaggaagagccagagttgctcttaaccactgagccatgccaccagccagattgcctcattcttgtcctatctaaacctgaccacggcttcctcaggactttattgttctcttgcttggagaaataatctcctcgtcgtctacccaccacctaggcgcaggaaattttcattcttaaccaaggactacatcctggtgtagggctcacagcagctggggcttacttgaaagaacttggtagtgtgtctcctaagaccagaacctgtgggtggaactgggaccaggctgtcctcgttggatttggggttactgggctctagaaaggccactggtaaactctccagagtgcgtgacatgttccttgttggttactgtgagaactatgcaccacagagcctagcatagggtgagcgctgggtggctctacttcgtgtctatggccagtttcaagaagtttggactttcaataaaaacgactccgaaacattggaaggcaaaatgaataaagctttgccaaagttgtttaggttagcaagcaattcagggtttgcactacccggcagaactccctaaacacaccttttaaaggggccttcctccaattcctctgcatccctctgtgtctctccctctgccacgaacacactttgctcccagtgtcttctctgccacacctccctgcgttaggtcaaacccaagcccgttattttatcccagaagcccatagtgggtctgacaatctagacacactgaagaattgtgcttctgattctccacactgctctcgtaacccactgcacaagcctgggagtccccaggactccttcctggacctcctctagaggtggaagggaaaggtcactttaggtattatcggtatacacatttctcttcaatctcttaagagctcaaaattgggtatttgtcatttttatgaaactcagaaagtattttaggtttaattaactatgctgttgtttgaccccagtcgtggggaaaggccccagccatggctgtaaagtggactccttcccaggtgggcaaatggaagctgccttggaagctgatcttacaggaagtgaagtgaaaataccgccccctagaggtgaacaagggttcctgccacacaaggccgttcttgggctctgagccaggaaccctcggatgttgaccagaaagaactagccaggattctgtaaattgggttaccagtccgttttctcaaacatttcctaaggtgaaagttaagggattctactggctagaaatgagaaagtacctttctatctttaagacacagggaaatcactcagccctggctagccctgaactcactgtacagcgcggggtgaccctgagctgccaatcacccagctttcaactctccagcacgggaattgtatgtatgcacggtcgttgtcgtggctttatggagtcctgaagatcaaggcgcatccccagccctccctgcaccccataccttctgatatgagacagtctccgcccaggctgacctccacatggactgggagcctaggatgactttgacccctaccactcaattcttctaccgtacctcccaagtgctaggattacaggtgtgcactccagctattcttttaaaaaaataaaaataaaaataaatccctgtctagaaagaaagcaaagcttccaggcataaagaaaaacaatgtaagcctgattggtggggtgggggcatcaggcagagaacagtcaccccaaggaacctggccttgcctggccccacagcttcctgcttcctcgggggagtggctggattctttcttttcgggctcctggtgaaatgaatcatcattgcaaagaagtgaggcctgtgttgattcacaggcaagctcatcagccgccatgaagggtgtgaactcttgaggagacctgacccatgatctcctttctgttacctatgaaggaccttgccaaaatactcattttttaaaaaaagttggagtgtattcactgcacatgacactgggtttcctaaggacattgtcatcctagtatataaattactttggtcacattctcctcccagctgctctctcacctctgtccctgtagacagttttaccatctacatacacatgtggtgaaatgaaggatccatgatatttttgttaattaagcctgacttaattcattcagtacgattatctccacttgtgtctgtttccctgcaaatgacatggctttgttccttagggttggggagttccactgtgcacagagaccacatttacccattcatctgttgacagacaaagcttatctacataagggtgacggtacacatggatgtgtttctgtgacgtgttcacttggtggtagctgggtggtctggatgctctgttttagttgtaaggcatctctatgctgagttccatagtggctggactagttaggttcccaccagaagtctattgggaggcccttggttcacatcctcctgataacttgtcgtcattagttttctgttctaacagagctggaatctcagcatagtttaaatttgcatcttagaacactttttcatgtttcttggccattcgtacctcatcttttgaaaaccgactgttcatttcattagcccacttattgactgggctttaaaaaaaattatctttatgtgtgtgtgtattttgcctgcatgtgtacctgtggaggtcagaagagggtgatggatctccctgaacctggagttctggttgtaaacctccctgtgggtgctgggaaccgaacccgagtctgagtcaagagtcgcaagtgctgttaaccactgagccatctctctagcccctcaatgagggttttttgtttgttttatttcttggcgttttgtcttctggattctttatatgtgtaaatgctaatcctgtcagatgtttagttagtaaaaattccctcccgttctacagttttcaggcttgagcctctccccgactgagcaaacaggaatgaatggatgttccttcagctacagcggcggctgagggagtggctggatgagaggtaaagtcggcatttgggactttgagagaggttttgaggaggtggtgtctttgtgtgtgaatcttgggaacccgctcgctggctcgcacactgcggtaactaagaagggccgcaccttctgccctctggacccgactagaagagtctgccggctcgagccaaaccttggagttttcactgctgtggctttacctgggcaaactgtacccaaggaccccacctggcgacggtgagttctgggggtgccgccgtggaacgggggcaggtctggagctccaaggagcctggatgacttgtgtccccaactgttgcaggagtgcccgaccgagacagcgttgacacccacaccacacccgaacgcccacagccaggcgcttgcctggagcccgaagagggccgggcccacgggcgtgtctttcttgctccgcgcagggggcttccctgtgcgccccctgcaacgagcagtggacttgggtcgggggtgggggtaacaatcaacttatcttccgggtccacggttgtaacctcagcttgctccattgcgtcctgagtcttgttggaagttttgcctcgtttgtcctctcttgctctcagcggtaaaacttggaggtgtcttccctggaacgctgcacacagaggataatcgtaaaaagctggtgtttaaggcaggtgggagtcaggagagagaaaaaaaaaatccagtaagtgtaaacaggcacagaagtcaggacgaagttattttgatcggcctgctgattgactgatttcttgctgtgtagcccttggctggcctgcaacttgctgcaagaccatctcaacctggacttgtatccccccagtgctggcggcaggcttgtctccatgagactggtgtgattttagtgaaaggcggggatgtctgtctgtggcttttcagaggctttgtgtgctcccttctcgctctgagctctgcttcactctccaccgggcaccttggtttccctccctgtaatatggggcaactgtcagggttaacaagctacaaacgcatttggctggcgcgcttagcccaagtctcgggggtctctgtgagtatcaagtaaacacatcttttagtataaggacatttgtccactctgccacacaagagtcatctcagtgtggcaacagttcggctaacactatggaaatgtgggcttgtttggttacaagaaagtggaaattgataactaaaaccctaaacaaaacaggtctttgtatcagtttggcttacattgtatacaaaaacaaagcaagcaaacaacaaccacaaaaaaaaaaaaacaaaaaaaaacaaaaaactaaacccttataactacagggctgttttgaagatgtccacaaagagtgaggcggagccaaacaccattacttgctcacttaccattttatgagaccagcttgtggggtaaccgctgaggttaagcctgctgcccactggctgagcattttcctggaaggtggttccagaacccttggagctagggagagggctcgcgactgtagtggcttaaattcgtgttcctgactcacaaacccaagctggtgtcccactctgctttgcataagcagttgttcctggcctgttccaggaatgcgtcacacgagctaacgcaggatgggcctgggaaagctgcagtttctcccgtgcatgggatctaggtcattactcaggcccagaacccacgcgacaacacccgggactccgtgtcagcctgcatggcccaagggaagatgcgcacctgcctgccctgtaaggctcttcctgccctgctttcagcgtctagcgcctcctgtggaggatggggacagtgggagcttctgcttcttgggagacttagggccgagaggcatggtgagggctggagagaacgcgccatggagaagggcattggctgctccgcaggacgccagagtttaattcccagagcccacgtggtgtctcacagccatgtgtaactccagatccaggcagtcagatgccctcttctggcctctgtggtcacagagggcacacatggtggcacacacacacacacacacacacacacacacacacacacacccatacaggcaaaacacgcagacacgaaactcacatgcagtcttgcagaacatgctgggtatttttttcagtgtgtgtgtgtgtgtgtgtgtgtgtgtgtgtgtgtgtttggtgctgtggatcaaacccaggaccttgtacctgccaagctcacatcttaaccaccctccactcctgaggcctgtggaatcccaccagactcaatcctgggccacgggcttcattttttttcctgtttgtttatggcagagatctgttgatggaaaacctttgtttactagctctgtgattttggctaagttattttgtttctctgagctccagtttccttgtttgtttataaagttgggctaaagatccctgactctgccggtggcggttatggagtaatgactacaaactgtgtggaggattccagcttccacaatatttcctttttcctcgtgacctttccccaggacattgtctctaccacagaagcctttcccaatacccattttctcgttgtagagtttttgtctctggagcagtccttatgtttgccacatgctgtgttggcctcatgctggtcctaggagggcagtggtcgcccttacctgtcgtctccatctctgatcccttttcctatggagtgcctggtacagacactcaaaagtgaatgagactcactcaagttgtgcacagggctggttcactctcaacggacccatcaagtacgaactgttgagcagacacacggtgaaagccggagttctgcttagagagcccagccttggccttagtctgggtgagaggttcacattcctgactcctctccttataaatgtgtcatagaggcgctgaggatggcatagaagtgactcagaaactggtttattctggctctcagtttgagtggacacagcccaccacagtggagaaggcaacgcaagtgtcaggctactggtcaccttgtgtccacgggaagcagagagcagacaggaagtgtcacctggctataaaacctcaaggcccgcccacagtgacccacttcctccagtgaggctccacctccacagggaacagcaccaccacctggggaccacgtgtttgacacttcacctccaaaccacagcagaaatgggctgcaacgtgacattgtgttaacagaacaaaacaaaaatcggcagactggccacggagaatgagaccccctctcaaaattggggcgacactgtctaattcatgaagaggagggagcactttaatatccgtgggtgggtctctctcggagatctttcaggggacagaataggaacagaaatggaaactggcaggtgactggaggatgtgatcttgtagtctttgatttgagtaggatctggagaaggaaggccggctttgctgaggttgcctcgctgtgtgttgttagacttcccttgccctgtggacagttaacccatggggggggggggagtcagagagttttccaggattaaagacaaaggcaccttttattttgtggtacctggttggcagcagcattttcatcgccatggaaaaagagcgaactggacttgatgctgagggaaaaggcaggaaagcctctagcacaggacgggctccacgtgtgtctttctctccttctcttttgctttctgaaaaagcagctacttatgtctttcaagctactccacactcggtctttcaaaaagcattctcagaactatttagtttgtccccgagacacccttttgggaagcgggtacctgcccctccctgtctatccacatcaggggccacattgactcactgttgtcatcacttctgccttccttgtgtggttctatggtctgggcgcacggcaggaaaaacggaaaaacaaaaacacgtactcaaagacccttcccgcggcgctgatggagctgacggagctgagacttgacttctaatataaaggcacaacgaaggctataaagcaggagcccaggcctccagggtgttcccctaaagtgggaggacacgtggaaaccccgttcgtgctgtcagatgttcttgagtcaactcagttgtgggccagaggctctggggcttacaggttacttcagagcagtggctatggtggtgcagttgcacctgtagtcttacattcgagaggcaggggacattactacaaatctgagcataagctaagtgagttcagaggcagagataccctttctcaaacaggaatcaagccaaaaagccccaagtatggggcgtggtatttatgaacaaaaatcaccataggcatcgcaactcatcttcatctagattttgtagtagaagtctctctggggtcctggactactatgctcagagaaatgtccaagctgtgcgtgtctttcctaggaatacagatctggggactggagatggcccggtcagtcaagtgcttgcaagcgcaaggatctgagtttgatcccagagctcatcccaggcctgatggaggatgctgaggatgctgaggacatagaaacaggaaaattcccagggctcagccaaccagcctagcgaactcggcgagttctagactagggacgctgtctcaagaagaggcgatgccacctgaggacacacgaggttgtacccggcttccacacacaaatgagcctgaacacacatatacaaaatagacaatacagattccccaccctgtttcttcttattcaaaaggatctcactacatttctcaggctgtcctgggactcctgacgcagtctcccaaatgctgtcattacaggtgtttaccacccatctggaggttcaggcggttgaagctagtattcagcaaatgcagttgacgttgactcagcaatctgcagacatctaaagggacagaagattggcggagggcggggggcagggggttgctctgatgaaatgttaggcatggcacccctgcccaggttgattcactctagataccaactccttggttgaagaattacacttcctgtctgagtttacatggcagccaaaggccagttacacttatatcaccatggagacaaacgggaccatgctctagcagactgccactgctttaacgggtctcccaggcaaccacactgacttagagaagagggacgagacccagcttgccttgtgtcatggtgcttcagggttccttaagcattagcacttaacatttccttaatatgctaacacttcttttttaagattttaattcatttatttattttgttgctacgaaccgcagagttatgcatcgagagctcagttgacaaaaatcacaaagctaacccgctggcatcaccagatggagaagcccacatgcaggatggtgggagtattcgctttatgaaaagtcactgtccttactgaaaattacctgtgaagccttggtgctccctttctatggtgggattcatccccaaagctccagcagttattaatcattcactgggcacattaccccctgtgcatccgtatattggacgactcccccagcaatgtgtaacactggcaagaatgcaatcacaaccaataccctcactctcaaccaaatctttgtataaacttagaagtctgccccccccccagttatcttccttggtagacagctggtcagtgttagtgtccaggccaagagacctcaattaagacattcacagatgcctgaggacaggaattacagcatgtctaaagttgttgagccataactctcagagagatacaagaagagtgtcctggattctctctgccagcagataggaaagtactgtcacaagctaagctcatattaaccttaaagcatgcctatcttcacttgccagtctactaacaatagatctgtgtcttaaagtggtcagtgggcactgtgccctccctgtcttaacagtggtcagtgggcactgtgccctccctgtcttaaagtggtcagtgggccactgtgccctccctgtcttaacagtggtcagtgggcactgtgccctccctgtcttaacagtggtcagtgggcactgtgccctccctgtcttaacagtggtcagtgggcactgtgccctccctgtcttaacagtggtcagtgggcactgtgccctccctgtcttaacagtggtcagtgggcactgtgccctccctgtcttaacagtggtcagtgggcactgtgccctccctgtcttaacagtggtcagtgggcactgtgccctccctgtcttaacagtggtcagtgggcactgtgccctccctgtcttaacagtggtcagtgggcactgtgccctccctgtcttaacagtggtcagtgggcactgtgccctccctgtcttaacagtggtcagtgggcactgtgccctccctgtcttaacagtggtcagtgggcactgtgccctccctgtcttaaagtggtcagtgggcactgtgccctccctgtctaaccttgattctgttcctacagcctgggacccttgtgttgtcacattaaatggttcggctccttatctcttgctttaggaatgtgcttttgaccaataagagcaatttctttatcacttctaggctcctgaaggagaagagtttttagaatagaagagggaactagaagaagaagcatggagaagctagaaatattattatagacaggattattagagtagaaacggaacaataaagatcacaggaaataaagagcacgaccctcagattgtgtgtgacgttactatagaaatcttttacccctccttcactcctgagcagcattttacctttaggacccggggcggggctggaacagttctcatagcccttacattttgtgtgtgcttgcttgtgtgtgtgcacatgtgtgcagaggcttgtgtgtgtgcgcgctcatgccatgacatacttgtggaggtcagaggataactttcaagagtcactggcaactccagagatcaaactcaagtctcaggctgctgcagcagctgcttttaacccctgggccatctgtgtggcccttattacctcctttacagtcaccacacttacctctgggacatgtgacaggaagcaagggggcgtcaaatacacacctcagaatttcaaatgctgtgagggcaagctatttagagaaagatttagaaatgatttgttattgatttctctaagagctgacaataattttagattctgggcatcactgttaccatagtaacggtgatgtattaaggatgtaaatgatagggttattttattgcttttaaaatacttatcatgctgggtttggtgacacaaaccttcaagtaccctctgcggatgcagaactcagcaggctgaggccagaggatttcaagttcatggtcaaggttaagttttgctatatacaagatccatctgcaaacaaaacaaacacagaaaattcccactgtttcaggtggtggaggtttcattttcttctttttcaggctccttcgtattttataataattgactagttttgaaaaggcatgcaaatgtttttatgagcgctaaagagtcccgctcctgcctgtgaagtttaactagcttggtagaacagtccttcatgggttctgttctgaacccggcgtggctctggggccccatttactataattatcccagtgcctacaatggccttctgtctactcagaacctgagggaactatatttgtggggctgggattctcatgagaggcagtggctctcatctaactctgacagctgccctaagtttttcaggaaaccctgctgaagttgagctgccacacccccattctttagtgtgggactcaccagctctgggatggttgggggacttctctgactttccgaggaggtgctttgccctgctcttgtctgtcctggggttaggtggaatgctttttctaaaagtcatcatcagggagctgttatttgggcttgtgtcactctggttaggttctgaatcacagcccagcggtttctcggggctcagttcccaaggtcatcagcagtgtttgccctgcatctcccttttgggggcactcagcaaatcagtctcaggttctcgtgggaagttctgaacaccttccatgctgtagctcagcggctctgcctagctgcttaagaatggtattttattctgtgttccagatgctgagaacttagactcattgccaaaccagagcgtgaacccaggctaactggcctccagaacgtgtaacctttctgcctggccttcgattgcattccttcaatacccgcagtcctcccagtggtgccgtttctgtgacatgctgatgtctaaaagggaacctgtctgttgtcagggagggtggagcgctggcctccatggctttgaggaattctgaacatttcacctaataactgaatggtgttgggcaggtgcaagtgtcaggacacagccagaggagcaaaggtgtgggaggcttcttacagtggtcgtcagggagctggcatgctgagtggtgcagcgagctaggccagtctggaacctgcagggtggactgtccacaggcgggccgaggatctcagctgctgctgtccactggtagtttcttctccagggaagtctcaggtccttctatggattagatcaggcccttccagtctatccttgccgatggcacaccagtgatggcaattttcacatctacaaaggttgttggctgattgtgttgctgagaaccgtgaccaagccaagtagacacagcaaaaacaaacaacaaaaacccagtcactgtgagttttccatttctctttgcctgtttctcatgtgacagaggcagtgagcacctgtgggttgactgaggagagactgagagtaataaagcaatattaaagggtctactaagccggcttcaggaagactgagttacaaaagcagaatttagctaaaggtgtgcttgaggtcgaggcatgcattgagcaagtttaagattgctgaggagaggtttctgtgaagattgttcgccaacatgccacccattgggtccccttcccataacgaacagttaggcatggctacaggtactgcacaggatagtaagtgtggcctccttggaagaacttggccaagtccagtgtgcatgaccagactggctcctaagcggctttcgcaccatgctggtagtgtgttggcaggggagggaaatcattaggaaatgacatcagggcagtggacttgctgcacggtcctggccgtagcttttgcctccatgacactcaacaccaaagatgctggataactgtctgtcctcactttcctctacttgatcttgtctccagaatgccacagttgcatttggcttgcactcgttgtctgattttgacttttcctttggtcctgtggcttattcaaggatgttagaggatctggtcccaaggtcaattgtcaggatttcctgtagcccagactagccccaaacttgtgatctccctgctgctgtcttccgagagctggggttagacctgttcgagttacactcagccattgttgaaaatttgatgaatttgtagaaggagcatctttgtgcatctctgatatttcaggtcagtcaaatggcttgggggtatgctgtggccctccgtaccatgctccagattgccctctaaacatttacaatgatttctgcacctaccagagtcatgtgagaggatgggactgtctccattcctccctcttaccctcccgaaggcactgtgatctgtatttttcagtattaatcgattggtggatattaccacaacataaagcctgtctgttttcattgttggattttgtggtactgagggtggaacccattcatgctaggcaagtgctctgccactgagctatgctctggcaggcactgtgtctccatcttgaattcagtaattctcaggttacttgaaatagtcagccctccgttggctacagacgatcacagtcatgtatttcagagccaggaagcaagactgtcatttatctgtccccgttgctgttccccagtgtcacttaacggcttccaccctggctgcccctgcactgtgtgccctccatacacttgtttcagtgtcttgcacagtcacgtaaactttcaaacatggatggacacgcatgattcaaactaaatatttggatcctctctcgtttaaattgtgtgatatgataatgcataagatgaaaattaagtctgaaatgcgtcttcctatgctttctcactcacaggtaaagggctgagagagagccagagcctttctcttgtggtttctagtcacgtgaacccagggacaaaactcacagctcctggacccgtcaactctcttgtaatggagtttccaaggaaacgcaaaggcagtgattcagagtcggcacagtaagtgcacattgctctaactccatgaaatctgtcagtcagaaaaagggggccatgtttacatcatttctaagtctgtgacagcatggcagctggtcgccgcctaccgctacctgtcagtgaccttgcctgccagggctggtgatgatggatgtctgggagggtcagttaggacctgaaggagatagatgatggggcataatcaatgtgtaatgctcacagtcacagccagcgccccccttcctcatcagaatactccacctggagcaaaagattcagcaatgcttggcttccggtcccagaataaccaggcctcggtgatccgaagtcagtttaaatcttacaaagctcttgtttccatagttactaagccaggtggatgatgaagacaacggtgagactatgatccccttgttacttgcttgtttgtttttgtgttgctgggaataaacccagggccccaagggtgctaggcaaggtttgtgcttctgagccacaccccagatcctcacaggaggattctaggcagacactctacccctgagccacccttcatccagctctgcctcttatgctccttgtagcctaaggtattccttaattactcccccaaagcaaggtttatacagtaaaatcgtttggggcagaccgtgggatggcagtgtgtgaatgggaaagttggggacagtttcccaccgcacctgaagggcaaagctctgagttagagaagagcatgaaaataagcttcctcggtctgtttaagtcagtccgcaccagggtactccatcttttagctctgatccccaggacagtgagtggcgctggccaactgcacgtgactgggagattcctccctgatttaactgtgttctccaccctctcccattaatgaggtatacagaggggcagctggccaagggcagttaccttcatcttgagttatcatctgataacaaatgatagttcctactaggttggttttttgtttgttttgttttgttttgttttgttgcatgtgtgtgggggggttttttgtttgtttgtttgtttggtctttttttttgctttttgagacacagtttctgtatgtaatactacttaggctgggactcactatgtggcacttgtagctcaggctggccttgaactccataattcagagagggtttttcttcctccgttaagcctctctaagaatagtctcatagacatgcctggaggtgtgtcttctaggtgattccaaatcctgtcaggtgactacgagatttaccattcagggggtggcccaaggcctccttccttccagaaggaagagaattcatgacagaaacaatggtggaaaacttcccctagaaccctttacctcccttccttcaacaagaatagagctagcagcacccaatggcggaaggcaggttagtctgcctagtgtccctgttacgggaagagggtgtgccctgtgaaggaagcaggttttgctcactgtgctcctcagagttttgccctggcccagttctcctatcgttttccaggatatttcaaactgcagttcttgctaagtgctggatatgtgtattatctctctcagggtgagaaagccagcccacagacatatgagaagttttgtttccatagccccagattgtttaatacttgtaaagaagaccccgtgagaatggtcacttggtgtggcactgttggctttgggtggatagctgattctttcaaagggactttgatcaagatcctgtactatgtagttattcaacatttattaagaacctactatggctgggcgttggtgacacacacctttaatcccagcactcaggaggcagaggcaggcagatctctgtgagttcaaggccagcctggtctccagagtgagtgccaggataggctccaaagctacaaagagaaaccctgtctcgaaaaaccaaaaaaaaaaaaaaaaaagaacctactatgtggggctaaagagatgtctcagcagttaaaaacacgtgttgctctttcaaagaacccaagtttggatcctagcacccccagtgactcacaactgcctgtaactcgagctctaaagaatctgatactctcttctggcctccatgggtaccccctccaacacacatatacacacagagaaacaaataataaaatctttcaaaaaggatttatgtatatgagtgtctgcctgcttgtatgtatgtgcaccacgtatgcagttcccacagaggccagaaaggggtgtgagatgccctggaactggagttacaagcagctgtgagtcacctgcggtgctagaaactcagtgccagtcctgtacaagaacagcaatgctgttaaccactgagccatttctctagccctcaaaaaacaaaataaagcaaaaacaaaaacaaacaaaaaagcaacctactatgtgacacctggtagaataggaggctgagcaccagattagacacattgtgtttcaaaaggagagcagtatggaatgggtgaggattgttggatggcaactgtggaagtgtgggtagcctagagcggctgaggaaagcaagcattggaaggaggctcaatttaaaaggctttggaggcagcgcggggccccagagtgaggctgatggtggctgagggggaggagacatgattgtggaatattataaactatagagcttcatgactgtttgacccttgaggaaaacaaggtgttgagaatgaatctccatgtgctgcccgccacggtcacacacaggggagagctcgcaggagtggagggaggagacggaaggggcaggtgttagagtgcctgcggtttggaattcctttagttgcagattccttgggaagcattcaggggcagaactgtctccaaaggctggagggaggagcatggcagacactgtcacagaacgcagccggggagcctgtggagccttgggaaggagtgtgttctcctaggttctctgcccctgggcagtcaggaaccaagcagggggccaatatctaaggagacataggtgatggtgatgatggtgatgatgatggtgatgatggtgatgatggtgatgatgatggtgatggtgatgatgatggtgatggtgatgatgatggtgatggtgatgatgatggtgatggtgatgatgatggtgatggtgatgatgatggtgatggtgatgatgatggtgatggtgatgatgatggtgatggtgatgatgatggtgatggtgatgatgatggtgatggtgatgatgatggtgatggtgatgatgatggtgatggtgatgatgatggtgatggtgatgatgatggtgatggtgatgatgatggtgatggtgatgatgatggtgatggtgatgatgatggtgatggtgatgatgatggtgatggtgatgatgatggtgatggtgatgatgaagggtgatgatggtgataatggtggtgttgatggtgatgatagtcatcataatgaaacagaaactgtaaaacgcttcctagaatgggcagaagtgtaggcttttctttgccttgtgctttggagagagggtcttgatgcataactcaggcgggccttgaactctcagtggttttcctgcacaagtctccagagtacatgattttaaacatggagaagcttcagtggagaccacgtgctttcagggaaaaccagttggaaacggaagacttagcatcaaaaaccacagcaacagtaccagaatcagcgctgtgtctttcagaacagggctccagcacttttggacacagtctggagctggagggggatgaagtaagggcaacagctgtgcaagtttcaggtcacctctaatgagaagaggccactcactgtcccacagcggagagggaggaaaccacagcccgtagaccacagatgtcttagctcaggaagttcatggtcaaagccgctggatgtggtgggtgctttcacaagcactttccccagaggcgccagcttctcacgtaagtgcagctgctgtaagagcatcctgagagccatgggtcctgcacccctagtgcctctgggcaacggggtgaacattagccaaggatgttctttctccctcccagggaagctcacagccagatggagaagcggcggagagacaagatgaaccatctgattcaggagctgtcatctgtgatccctccactcagccccgctgcccgaaaactggacaagctcagcgtcctgaggagggcagtgcagtacttgaggtctctgagaggtaagtaaggatgagagctgtctcaggctattgacatcatctctttatcagagagctctgttaactctgtggttggtcctggctatgatatgtctgtccgccttaccatgaccatgcaaaattgtactccttgccttcatgtgagaagataggctgtcagacactaaaaaccccaacatgaaggtgtagaccagcagattaggagctcaaggccagcctgggctacatgagtccttgtctcaaagcaaacaaagtataaaacggatacacactgccaccttgtggttcctttctagatctctgcctgtaaagccaagcacagagcaagagtttcagagaacagggtgttctgtggaccctgacaacaatcttcccagactggggatgcaggagagagcagagctctctgggacttccttttctgtgcttagagatctgggttcgttccatcagtctgttgagaaacaagagtctcttttacccactcctgaggcttgcataagttacttggtttctcttgaatctttagcaatgaaattccaggctacaccagggtcatttgattccatcccagagattacccaaggaccttaatattagccttgtcccaggggcatgagtcagtcagctaattcaacacatatgaattgaacaccagctataaacctattctctactaagagaaaggagaggacaggagaggagagagagagagagagagagagagagagagagagagaggcgcaaaatctctgccctttggatgtctctgttgacaagagggtagactcacagtgaggtcattgtcccctggtgtggggacagtgagatggctcagcgggtaaagttgcttgtcaacaagcctgacaacctgagtttggtccctgagacccacatggtaggaggagagaactgatccccccatgaataaataaaaaatgttttaaatataacaacacaacccctagtgtggtatgtgtcccagcagaggtgtgtgctgggaggaactatgggaactgagcagggcagacactctctaaatccattgccatttccaggggctgatgtatctggtgccacaccccttctcagccatcatgtggtcagctgcttgtctacacagcctgaccaagcctgagtcagcacagcacattagtgaagatggcttaagacacttggttctgtgctccagtgtgtttggcacagcacagctgtattggttcggcaaaaccttagacaccaaacttcagagggtgcctatggactgtgttatagacacaacaggcagagagtagcctgtgaaactctgggttggagtctcagtgtcacataaaccgggtgtggtggcacacacctgtaatccaagctcttgggaagtggggcaggaagatcaggagttcaaagtcgtcctgggctacatagtgagttcaaagccagcccagaatataggaggccctatttaacaaaaaaaggaagaaaagagggaggggaggaaggaaggggagggagggaagggtcccaagagtccccagatgttgcgaacaccactgcgccgtcattgtaatagccgcagcagctcatggacggtgtccactgagcaattactgaatttctttctctgtgctctcagtaactttggcctatttgtttttaggcatgacagagtctttcttaggagaaaattctaggccttcatttattcaggataaggagctcagtcacttaatcctcaaggtaagtggctgtacttggattcggatgggagcaggatttcagttcacctctattgtagccatcagagagtctgtgtctcacattccttaaattagacattggagataaggaaataaccttgtgtactaatgcctcattagtttggaagagcaatggacatctccattgcagaccccctcacacttaagatacccccacacacaatccaaggatcaaccatgggcaccacctcctcagtgccacccacctggagtccagttataagggatctgtcacctggagactagggaatgattcattcagagttctcctgttgtggcctcatcttctcacaggccggggctttgcagaccccacagcagaaaattggtgtttgattgatagttttgccatgcactatgacataggtatgtgttgttcattttgttcatctttctttcttttcttttcctttttttcattttctttttcttttctctttttttattttgagttaaggtttctctatagctctgactgacctggaactcaatttgtagaccaggctggcctcaaactcacagagatctgtctgcctctgcctcctgagtgctggaactaaaggtgtacaccaccaccacctagaacattttcttttcactttaaaaaacttactcttattttagcttaatctttaagatttactttttattcatgcgtgtgtgtgtgtgtgtgtgttaggggaagctgccccagaggacagacagatctcttagagcacaggttatcggcagtttgaatcacctgatgtgggtgctggaaactggtaagctgtatccccagctcccagagagtttaattcaaagaattttattatactgatctgtgggggaggggggatgtatgtcatggcatgtggctgtgtgcatagatcagagaacagctggtgggacttggttctctccacccactttgtggtgttagaccccccagaaaacctcaggtatctggggtcccaggccacgacctcggtcaccccaatcaccaggcagattcgagagcctgatgcaaactgcatgaggctttattgttttctatcgagctaaccccatgttagctcaggtctttcatccacccgccatggcaggtggctagcaaaaacagcttgaacctgctgtcgagtgatcttgtaggtcagcataaggggagtgtctaggggtacacacaggctcacgattggtgatcttggagggcttgccctgtgttgattggccaattgcttgttatagcccataggccctcccagggtggttgctatgctctccgcgtcattgctgtgcacttgtccgtaaagcacacccagagtcataaagcatagcgccaccagctagcttctgattggttcctaacgaggcaggcacctaacctcttagtgaccaaggcaaggtcatagcaagcacgtgtcatggctgctgaaatggggggctggtcccttcagtgggtcccgggagtcatgcatgtgtgtagatgagagaacagcttggcagcaagtgtctgttcccactgagccatctcactggccctgaacagtgattttgtggatatagagcaatctttaagttggattattgtgcgaattaccaatacagagccaggtaaaaacacaagggaatttaatagggaaaagccttacttacagagcgacctagccatccggtggggcagcagtaagtacagcaagccaaagatgaaagcaaaagaaggagcctgccacatgagcgtccctcactcataaccttccctccgtcaccctgaccacaccctcgcaggcgttgccaggcacacctgtacccagcccctaagcaagcatggctacagcatcccctataattccccttttagtctaaaagaggattaaaacttaacagtgtaaagtatccaaaattaacaaatcatagaggtgaaatataagaagatacaacaatctgcttatgtcacatcctaactatctatttcaattaaaccctaaagtcatctgaaagaggtgtccaagcctgaacacctccttccaatcccaaccatcaacaataagaagctatccctaactaggtatatacactatcctaaataacaacaatggggaaaggggatgtagcattctccaagttgcttcctactgaaatgggatgatgacctccttgtggggtcctataggaagaaaatgttagtatagtgaaagtcttgaataaattgtatccagtccatgttagatgggatttgcttaatttaagatctcgattgaaatcctcaacttgattgaagtcagtacccgaacctctggccggagtgtcagttgaaacggagcaagttggatccagtctgtggcccattttctttctggggcatccagggattgctgtcaggcaggtcttcattggctgtgtgggactcagacataaatgttagctgagaaatgtttgcttgtgtatgtaagcatgctagaaaaggcaatcatgggagaataatgattaagagagggtgtactccttgaaagaaagagcaaagaaaagacagacagtccccaaattcttctcttattctgtattacatcaattagcttcatgatacaatacagaaactctaaagtttagttaaacaaagtgctttgattttagaggaggaaagccaaatccacctctaaatccagcattgatttaattgaatagggactagaaaaagagaaatagagttctctgagagacagctataaagtttactgtatggcactttccttttgtttgatggttatagctaccttctcttcttaagtatctacccatgcagtgtcctttgacttcgggagatgagtttttctgtgaagataaaagcaaaacactttcttttcctttgggaggtttttatttagtttatgagatataccttagtaaaatacctgtcatttctcctgttgagaggtttttccttttcaacttgtatcttgatcaactttgatggtatccaaagtttttcttctcctgtggaaacaaatgcaaaacccctaccccatcgtaacacatatcctggtttccatacagaggttagtgcatctttgaagtataccggctgattcagttcagcagttttttctgtagtttggtgtctttctgcagctgtttgtcctttctcattggcattaagaaactttagtgttaataaagcattatgcaacctgtgtttggggggtttagtcttccaagcctgtttatggatcatctcctttagtgtcctattagatctctcaaccactgcttgtcctgtaggattgtgatgcacagagatgcaaataagagccatattaccctgaggccatggtaaacaatagtagccttactggcattaacaatacaatagtgggccggagctttccggtgctccatgtttagtgagacccaaggctggatctcaaaatattccatagcagaaatattttggtcccccacacctaaccaaggttctagttcatagtagtaataacctctggcctcttggtatgtatgctgacttaccaagtaaggtgcttcttcttcccaagcccttgcatcctcacctctagaacttttaatctcctgctgccttttaaacctttggaaatggcttctcccacccaagctccagtatcttgcacattatagtcagtgttggcttcatgctaaacccattcttctagcagagctgatctgatctttaaaggcaaaagtattcttttgcatattaggtttgcattttcgtaagctattgtatatacaatcgaatgtcttactgccggatctgttacttgtaattctgctgccctggttaacctttgtaagaagtcttggaattgttctgttggtccctgttctattctggcataaacttctaggcgttctcctggctcacaaaccttatcccaggcatttaatgctgctttcctgcatagagacagtatatggtcatcatattcagcctgagcctgtggatcagcataaataccctgaccaagaatcttatctaggggggctttaaaacctttatgccttgacactcaaggagcttatcttcttccctgaccaatgccttccactggatttggcatgaattctcaagtacagctgctaccagtctttcccagtccatgggcatcagcctgttaaaggttgcccatgaatgtaatagctgttttatgtatgggctatggagaccatatgagacaactgattctttaatattcttaagatccttcagctgtataggttgccatacataagccatctgtccctgagggtgtttcctagaagctggctttcctaccatggtagctgggtagactaatagtgtacgagtaacaaccttagaggaatagtcatgatacctgggtggagtaggtgccttgattggagtgattctgcctccgaggcatcccaatcatctttaagcctagtaatgatatccccatgaaaagttttaatttcatgcatcgtaaaagattccaagcatgttagtggatctgtaaattgctctaactgctcatctacatgtttttctaggtctttaatatgatcatccttaggcagcatctggatggcatggaaactgccttctagatattggaatctagattcaaggtcatgatttgctgattttgagtcctcagcaattgaccgtatggacctttgtaatctgtcagccttgtactgtgattatcgtccaaacattctaatctagactcacatttgtgatctgctaccttggatgcttcaataattgattgaatggcattgtccaattcttcaaccctatcctgggtattttgcacctttgtatctaggacacagcgcctatctgagtttctagttgggtacagatattctttagtttgtcatgatgtctgacagcctagcctctaactcctcagacatggagcatctctgtgtttatcttattataaatacgctgcctctcactttggtaacagacagctctatctttagtagcgtattggagatagagccaagcttatcatccaacttctgttccacttgctgcacagttgtggcctgacctaatctgttttccaaaaacctcattgcataaagctgttatttcctgtaagtaggtggtaaggttatccttgtccctgttcctgaggcctctggctagtaatgttatttttaccagcaagctaactgccattactgcatagaggccggtaattggtagataagtgtcctcctcgaacactgaattcacgtaatgagcaaagatattaccaattgtgaaaaatgataaatattccatcatgattttacctgatttctactctagatgcagtaactatttttggccagcaggtggcgcaggcattcagctagtcctcgaggcttttggcaactgtgggtcaggcaagatggtggcagcttcggtggagctgaggtcacacaggcggctgcactttagctggaagtgtacggccttgcggctgcaaccactaaaaagccgcagctttgcagcctctgcagccaggggaagccgccgccannnnnnnnnnagaagccgtgggccctgctgaaagctgaggcctactctggaggcctactcggctcaagggcaggaggccccctggtgcgggtaggccacagtcagggctggtcccatgcacatagctagaaaccgtggggagtctgtagaactctcccagctgggcggactgttctgagaggctcggcagctgctcgtgtggcggggcgggtcagccgggagcacctgtggagagagggagcactttccccaccacgtctgccctccaggtaggacccacaggctctcccaaacgggcttaggtttacaagatcccacttctgacaaccacatattgcgcgaattaccaatacggagccaggtaaaaatacaagggaatttaacagggaaaagccttacttacagagcagggcagcagtcagtacagcaagccaaagatgaaatcgaaagaaggagcccgccacatgagtgtctctcactcgtaaccttccctatgtcacccctcgcaggcatggtcaggcacacctgagccagtccctaagcaggggtggctacaacatcccctacattggataaccatgcagagtgatttggaggcccagtcacaggtcatcaagggtttttctcatcatcgcttcccattaccccagcacatgtctacgtaactcttctcctgtttgttgtgagaatgagcacggggagggtaacttagctggcagggttctagtctaacacaagcaaagccttgggtttggggccccagctctgcacagaccaagcatggtgacgaatgcttggaatcccagcacttgggtggagaaggcaggaggattgggaatccaaagttctagactacaaaagtttgagtccagcctgaaccacacaggagactattacaaaagagaggctactctggagaacaccacacttgtgccccgggccagctgtggctttctgggcaagtggcttacccgagggatttgctgcctgagcagaagagaaatagaggctatattagaatatttaaaatttgttttaataggtggtattataattcaaaaagaatagaaagggctcctatcgagagcgtccagcctggagagatggctcagaggttaaaagcaccggctgctcttccagaggacccaggttcaattcccagcaccaggtggctcacaaccatctgtaactccagttccaggggatctgatgccctcttctgcctccatgcataccaggcacatacttggtgcatagacttagatgcaggcaacatacacacacacacacacacacacacacacacacacacacacacacacaaccacaacacacacacacacttcctctcccagtttgcacagcatgtgtccgtagctacaagtgacaagcgttttagaatctttacagggtttctctgtgtagcagagtggaatctggaaaatattatccaaagtaatggattttactgtgagtttttacacacacgtttatactttggtcatttagcctttcccaccctcccctgttctctttttcactccagatggttcccagttctgtttcacatcacatatcgttaccttctctttttctccttttaccctgtaatgtgtcttcttcccactcatggtgcgtgtcccatgaccctgcacacatgtactgtagtttgataatgagatatccaaccaaatattctatagctaaaattttcatctcaaaaactttagaactgaacttgacagtctctatgtgtcatattaaatttttagactgaaatttgtcagctgttttaatgccaccataaatttcctcaaaatctgactcggttttggttctgttttaatcctagacagcagaaggcttcctgttcatcgttggatgtgaaagagggcagattctcttcgtatctaagtccatctccaaaaccctgcagtatgatcaggtatcaaaccacggtgttctccacttggtcttgattcttttttttatttttattttttttattttttatatattttaattacaaagattgaattacatgacaattccagttcccttctccctctcttcctcctctaccaccccccaactaaaatcctacctatcatatgtcctttcttctaatctacacctgactcaacctttctgctccctcatgacctctgcatccttccttttcttcccttctcactctcgtagcttcctcccccctcttcccatgttctcaaatatgtattgttctcactggtttacctgattctttttttttaacaaatcctaatttgaagctgtgtctggccccttccttccctttgccactaagtcagagcttagagagagatggaagacagtggggaggggtgaattcttacgaccatcatcggtgtctccttcagacattgagaggtgacatcattttctgagccttagctttgtccaccgtcaggatcggtgcctgaagtcagggtgaaatgacgagataagatgtcatactggagtttctgaaaagtgttggtcaccttcctggtcccttcaagtggtcacgtcattgctcattactaagttataggcattgaataaaagcggtgatccaactgctgacaacacagaggagccacgttggtcgtgtaaccagcctgctactcatgtcctccaagttagactcctcttgagtcaggcagctactcagaagctgtccccaaggccggcctgcagagaacagctttgatgggaatgccttcccctgggttctgcctctttcaattttaggttagcagctaaaaaggtcaatgacagaaggggccatctgagcttctatgtgggagaccaaagaaccccaagctggagacagctgggcacacaaatggcataaaaacacatggtccatcttctaactggagctaagtggaaaatagcatgcacacatacacacatacatacatacatacatacatacatacatacacacacacacacatgtgtataacacatatacatgcatgtacatgtgtacactcaaatgcatatacatacatgtgcacacatgcatgcacacacatgcacacaaatgcacatatacataggtaaccaacaagattgccttaaattacagattagtgagcagggctgatgtccactgggtgctgatagcattgaagactccctgtcttctcaggaggttgttgggtttagttattggcttttcagaatcagaaacccgacactgctgagtgacttctggacgtggacttattatgttaacccagcatacaatagacggaacaaacggcagatcgctggggtcttagtctgagctacctaattggctggtccacctgttttgtctcctgtagaacatgtcctggagacctttgtgagagggtgggcttgtcatcaaagtggggtgactgtggcaccttcaggatgacaagaagacaggaatttcaggctgtgaatcaagagtctagagttcaagaagcagttggctgagcagccacagccacaggtaacaggcaggtgcctgagagcctggtcagtgctcaggaggataaggcaggaagagcctgagttttgggtcaacctggattaatagttagaggcaagaaaacaacaactaaagagaaaagaaagggattatttcacctgggcaggtcctgttccacttgacaataccagcaattattgccatcatttgctctgatcagatttgtaagtgtgtgtgtgtgtgtgtgtgtgtgtgtgtgtgtgtgtgnnnnnnnnnnnnnnnnnnnnggaagggggagggggaggggaaacaaaccatggattgagttagaaaggccaatgaattttacgtaaggcatgcctgcatgttgggagctgaggagtgggaagtcagaagactgttgggcttgcatcttcacgttaaagatgagcagatgttctgggcttcattttctgctatgatgtaatcccttgccttatattacaagtgatgaagtttatggctgggagatgctcagtcagtacagtgcttgctgtgtaaggtagggaccagagtttggaccgccactgcccatgtagctgggtgtggcaatgtgctcctctaatcccagcactgaagaggcagaagcaggaccatccctggttctctctggccagctcttccagctatcagtcagctccaggttcacacgtgcataatcacacatcggaacggatggacacactcgcacacagacacatacatattggaaaatgaagatgaaatttaaatcctaatgccttagaagcaaccctgaactgagagatattaagcaaggtctgcacagtaacaagatttaaaggaaaatcagaaaccggtgttttatgtggtttatatgtagctatcctgatatggtttcaagtacatttttagatttttatatgtgtgaatgtttgtctgcttgtgtgtctgtgcaccacatgtatgcattcgtaccgcagaagccagaggagggtgtcagaccctctgggagtggaatacagacgcttgtgagccgccgtgtgggtcccgagtcttctggagaacggcatctgcttcttaacgaccgaattgttctccagcctcagagtgcacttttgtttgtttttataaatgtcacccagaagctcaagttaatgtcccatggtgtgatgcacatatatttaagcgtaaggaacagtcccctctccagatggagatgtagctcaacggtagagcactctcctggcacgcacaaggccctgggtttgatccccagcactggggggaaatcagtctcttacaaggaacaggggtttatcgtacgtgtgtgcggaaatgtctaaaagcaacataactgatgttcagtgtgtgtctgctttctttgcagggcaccttggtgggacagaatttgtttgactttttacacccaaaagatgtcgccaaagtaaaagaacagctttcttgtgatgtttcaccaagagagaaacctgtggacaccaaaagtgagttctccctccgaggttcttacctctgtgctgggtacttttctgtagatgagataaatgactgtggccaaaaacaacctaagaagaaagggttttgttttgtttttaagtttacactttcagagggatagtgtcaatcacagtgggaaagtcgaagcatgaaggcagggacaggaaacgggctggttacagtttatccacacacaggaaatagagagaggaatagagagagagagagagagagagagagagagagagagagacatatacaataaatgtattctcacgaagatgatgtgtgggaatttatgattgcttatagttttcaatccaaatgaaacatttataagccagtattatttgtggttaaaaatttgctagagttgggctggagagatggctcagaggttaagaacactaactgttcttccagaggtcctgagttcaatttccagcaaccacatggtggctcacaaccaccttgaatgagatctggggccctctgctggcatgtagccagaagactgttcatataataaataaataaaatcttaaaaaaaaaaaagagaagaaatttgctggagttttattctctttcgtatatggcccaagtttgcctggtatgggagatcttgcacatttgcgcttgggaagaatatatgtattcattatccatatatacttaacttgtgaaaatgcttagtgccaaacaattatttatgatatggaaatagtgatttaggggccagagagatgtgaattcagttatgagcacttatggctcttgcagtggacccaggttctgttcccagcactcacagtgtccctcactccagccccagggtgtctgatgtcctcgcttgacctccatgggcatgcacaggtacacacatggtacacatacatccagtcaggtaaacacacatacgtaaagtaaaaataaattttttaaaacattaaagaaagaaaatgacctcgtcagtttttaattttgtgtttttatttgtttgtttgagacagagattcactatgtagcttttgctggtctggaacgtcctatgtagaccaggctggcccttgaacacacagagatcctcctgcctctatctcccaggtactggaattaaaagcatgtgtcaatacatttgggcctagccagattttttgtgcactctacaatcccagcatttagagcagtgaattatgaaatcaaggctagcctgggctaagaagtaagaaccttcttcaaaaacaaaacgaacaaacaaacaaaaagccaactatggaatagtggtgggctaagctagagatcattgttgcacttgagtttttcttcatttttaaatttcatttcatttcaattaaactgtattgtccactccctcaagaaaatattaagatagattgcaagtgctttgaattgttgagtatggtggtgcatgcctacaattccaacaccctaatggaggagtaagttggagaatactgaagttcaaggcctgcccagcttacagtgctggaccctgtctcaaaaacaaaacactgccaagcaaacaaactgcatatatatgatggtgggtggggactttagcaggggctgacgaggtaactcccaagttagagtgcttactgctcttcctgaggacctgagtttgtccccagcacccaatcaggccactcaaatccacctgcgactctggctccaggaggtctggtgccccctcttctggacttctcaggcacctgcacccatctctctctctctctctctctctctctctctctctctctctctacacacacacacacagacacatacacaaagattattctctatttttattttcttgtattttgttttgagaaagggttctccatatatcactgactatcttggaactcactctgtagaccaggctggccttgaactcacggagagccgtctgcctctgtctccagagtgctgggattaaaggcatgcactgtgattattctttttttaagaggagggaagaagagagaatgggaggaggtggattttaagcacgtctgtgactcgcgtttctcattcccgctgctatggaagcctctctgcaggtttacggtcacggccaccgtgggcgaccaagcgtgcactctggctccaggcgatctttcttcttcagaatgaagagctgtaaaatcccagtcaaagaagagcttcgatgctcaccctgctcaaagaagaaaggtgggactcttgggagagccggtgaccagagcctggtgtgaatcacaaggtcctagttagtttctctggaagaacatgtaaattccacagtcaaggcaagaaatagaatacaaagcatctgagtgagattgttttaaaccaagattgttcatgtcggctcacaagcaggagctcattctgctgcctggggttttcacggtcccactgaacttgtagcagagagagcctaagtttgattcagggccagatctggtgcactcaaacctcagcactcagaaaatagaggcaggtggatctctgtgagttcaaggctagccagggctacatagcgagactctatctcaaaaataaaataaaataaaaactcagacaacagcagagttcaatctctttttttaaagtttgtttttgtttcgagacagggtcccactttgtagccctgtctgtccaggaactcactctgtagaccaggctggcctcaaactcagagatctgtgaaatagatgacccagagacagatattggggttcagctttcaagctgaagatcagaaaagcaaagcagccggccactagctctcacctctagctcaggctgaaagggtggatcctgtctccacgagctctcaccaagcctcttctcagtgtgtctggaggacaaatgcctccactgactcctgataccgtcttacatacttcttacgagtcctgggatgaaaggtgtgagctataattctcttttagaccgatgcactcttgtgtagatctaggtgaccttgaacacagagagatccgtctacctcttaatcctgagtcctaggatgaaaggtgtgtaccaccaccacctcctagcttctggctgctgggattaaaggtgtgtgcctggcttctatgacttgtggctggctttgctttctgaatcttcaggcaaactttcctagtttatgaaagtttgttgacatcaaatgtctcccagctggattctgaggtcagcttaatttttctcagagacttattctgtcttccaagtattaagtattccttctttcatttttaaaaagaggttgcaagtgtgtgtgagtaagtgtgtgtgtgtgtgtgtgtgtgtgtgtgtgtgtgtccacagaggccagaagaggccactggattccctggagctgtctgttgtagagttgggaactgaacttgggtcctctgaaaaagcagcaagcactcttgactattgagccatctctccagcccgtttgtttccttttgagacagagtcctgttgtatagtccaggctggtctagagcttctggtgtgtcatcctcctacctcagcctccctagtactgagatttcaggagtagagcaccacagtggctaaaaagtggtctttatataggacttcatgattctgtttattcacaaattttggctccaatcctttttataaccatgcatgaagaaaatcacaagtgctgacatagtaagcacatggtcctgatactgcactgagcatttaattcttgtgaaaatattcttatatctgtcttagaatcaaggaggcggccctggagaggttaattaacacccagtcacctccctcttgcccatggctctctgtggtacagagcctagggcaggggctatccctagatgtagtttaagaaaagcagcctgcaagagaaaaacaccagccaacagggttccaacggaggtttttttgggggggatcataaaaagggaaaggggagggggagaccagcccccggggacagaagcagcaggagagaggggagggagagagagagacagagacagagagacaggaggatgggaggtgggcagggcccttagaaaggaacacagtgaatgtgcacaggtggtgctcttagtggctgcagctgagggtgtgtcctgtcagaaccccaaggacaggccagtacagatgcttgaatactaacagtagtaattgttgttttaactataggtagaccagttatttcttgttttcatgtaagggagtgaatacatacacagtgctggtctttctgatctcacatgacgctgtatcctccaatctctttcgttttaccacaaatagtgggattccgttttcctctgtgtaagaacggtgctccattgtttataacccgtctgaacctgtctgactgttgacgggttcttaggctgattcccatcttagcgggtatgaccgtgtgctttaaatatggaatttggtgtgtggggagagtctctctgtaccttgactttgtttctctggagtggccagatgtcatgatactgtagctttttgaagaatttccatactgttttccaccattgctattaacaatgaccccacacacacacacacactgtctttgtggctccctctttctccacagcctccccagcatttattcgtccttttgattgtggccattctaactggggtaaggtggaatctcattctcttttgagttcacatttttctgatggctaaggctactgatcattgtgttacatattccttggccatttgtatttcttcctttcggcggggtcttagttagcgttactattgctatgatgaaacaccataaccaaaaagcaacttggggaggaaagggctcctttggctcacacgtcctcattatagtccatcgacagaaactcaatcagggcaggaacctggaggcaggagctgattcagagaccgtggagggtgctgcttactggcttgcttctcatggcttgctcagtctgctgtcttatagaacccagggccaccagtttagggagggcaccacccataaggatttttgtttgtttgtttgtttgttttttaatgccttacaggcttgcctacagcccagttttatggaggcatttttaaaactgaggttcccacctcttagatgaatttagtttgtgtcaagttgacacaaaactatccagcacaaatggagactctttggattgatttctattttgttaagtttgtatgctctttagatatggtggatatcaacttttgtcagatgagtcaccaacaatagtctcaccaacaatagtctctgggttgtgttttcttttgttgaccattccctgtgctgtgaactagattttgagcctggggatcccacctaggtaaagattgcctgtcccagcatctggtctgcaatgtttcctatttgtaacttcagaagtctgagtcccacactgaagtcttcatacatgtttcagttgacatccgtggagggtgagagacagggcttgagtttcagttctgcatacgctgtccagtttccccagcactgtttgtggataaagctgtcctttctattttccacaccagttttgagaatcagctggcctcagacatgtgggtttctttctgggttcctcatgctgttccgttggtctgtgtatatattcttgtgccaataccatgctgtttttgttaccacgactcagtgctatattttgaagctagacactccagctttgctcttgggactcctttgtgcttccttgggaattttaggtggcttttttttttttttttgctctggtgaggatgtcattggtgctctgatgggaactacattggatccgtagactggaattttaggtggtttttttattttcatctgtggtgaggatgtcattggtgctctgatgggaactacattgaatctgaagactgcattgagtacagccaagagaacaaagctggagctattctgccgtggggtttgttttgtccttgctttttaagaggcatcaagttaggttgtgtatttgaatcctgtcttcttgaccttattatttttatacgagcactcattgctataaaattccttcttagtgatttttgctctgtgccaaaggttttagcccattgtatatatatatgtgtgtgtgtgtttttttaatttttaaagaattcttaagttagcatagaagatacctggtgtcactgtgggcatctttatatgtgtatatgttattcatgggttgtctcattggttcttctcttccttgtgcccctccccatcctaggttccttcctccctcctgtcagtcctcttctgcttcctcatcacagtcacaggtatttccatttctgtctgtttcaagagcatcttaaattccccatgcagtgggagtacactgtcctgcccccattcagatacagtttttagttctccttactgatttattggctcatcccatcgtgaccaacaaagatacaggatatgatctcatccctcaagcatttgttaagactacttttgtggcccaacacagtctgcttgagagacaattcccccatgtgatgaagaaaagagaaaactgtgaaccgcacagatgctcagaggccaagccagtctgtctacacttggtcctcagctccgccctgcatgtgctgtgactgtagcccctgcctgttcccaaagacaagcagacaatatcagagcacctcacagaactattaaggaggttaaatgagttatacaatcccagctgtaagaccgcccaacagacttgtggctcaccctcttcatgtctgtcctgctgctgactgtaactcttagggcaacctacagcattttctgttaaaagaaaaactaacgtttctttttaaagatttattgttggggaccacaacatgatgtgattcttaaaggcacttgtggcacaagcccagtggcctgagtttaatcccacaacttctcaaagttgttctccgagctccacatgcaggctcctgcacatatacccacacacacaccatacacacgataatagcaataatgaaatctatcgtgctatcagtcttcctgaataatgccaatttaaaacaatgcctgttcaggtcttctgcaagtccagtcacaactgaatgttttaaataacttgcattaggtttttctctgcgttttaacattgaaggcactttgtctaaagcatctaccatgtgtgcaccacccgtcttctgagcccatgtgaccgttccttgtttccataaactttcctcatatttgagcaaacgatttttcttttcttgttttcctttttggtgggttggtttgacaagctgcttcatgggaattagttgcttagaatttttttctgaaaagtcaaggttttgagtctttttaaaaatactttttattgtgtttctaaatgctcatcaagcatttctgtggtcctactatgactatatatgtctatcaatcatcatcacaaacaacagtaagatttgtttttcataatagacagacatggtggtgcaggtcggtaaccacttgggaggctgaggcaatagtatgggggttaggagatagtctcttatacataggaactgggggctagcctgagctacaggatgaatttgtctcaaaaaaaaaaaaattggaggagggaagaaggaaagaggaagtggtggtaacattggcattcatgttgatctaagtgtatttctgtggcttctcattagaccacaggaaattctacaccgtccattgcactggctacttaagaagctggcctttgaatgttgttggcatggagaaagagagggacagtgttaaagacagtggtcctcttacctgccttgtagccatgggacggttacatccatatgctgtccctcagaagagtggcaagatcaaagtgaggccaactgagtttgtgacccgctttgccacgaacggaaaattcgtctacgttgatcaaaggtgagcactcaggctgtggtgatgaggagccccgggccagttgaggttgtttcaggggtgactcggtagctctacaggattttccttctaattggggcttgaggatagtttaagtggcataaggctatggttgttggtcgttttggtcaagccagagggcaaacttggaaaagcatttcttagcagtggtgctgaggctgggcctgctccatggccactgtgttggccactgatgccttataagggcatcagctggacttcatggggcctcacctgggtggcctgtttggtggctctggtctgtggctggcggggaccaggcagtccataggagcctagtggtccacgtgactagctctttccccggggctgctgcctcaaagtcacacctgtgctggagctgctggattctgggagccatcaccttcagtaagtgccatgctaattttctgtttcaaaaccagggcaacagcaattttaggatacctgcctcaggaacttttgggaacctcatgttatgaatattttcatcaagatgaccacagcaatttgactgtcaagcacaaagcaggtgggtaattcatcgagagcataatttaaaatgacaacttcagccagatgtgatggatcacactcaaaatctcaggacttgggaggtggcagtagaaggatcaggagttccaggctagcctgagctatgtatcaaatccctatgtaaataaataaataagtgtcattgttattgtagtatcaactctcaatctctcgttccttatgaaaccccaaactggagttgattcacaaggcactggttttgggtttggtgtttgcttttgttctgggattcagtacgggcccctggctggcctagatccagcagctaccctcttcgcacaaagcctcccaagggccgggattccaggcaggaaccaccacacctggcttgaggtcgtttcattctaaaggctgctctgctgatcgcatcttttcttgcgaagttctgcagagtaaggagaaaatacttacagactcgtataaattccgcgtgaaggatgggtccttcgtaaccctgaagagtcagtggttcagcttcaccaacccttggaccaaagagctggagtacatcgtgtctatcaacacgctggttttgtgagtagttctctgtaacgataactctttccgccagccacctgtgttatgccgccacgttagggcccccaaataacacacagagacttaatattatttacaatgctgctggccaatgactaagatttcttattttctagctctgtcttaagtatcaaccataaccattaatctatatattttataaagacttatcttctcaaggacaccagcggcatgcatcctcttcctggggatcacatggtgacccctctttattacgtttcccagaatcctccttctttcctagtcctgcctatcttgctttcctattggtcaacagtgttttattcatcaaccaataagacaaatacatatacagaaggacttgccccatcagttctttgtcttcttatttgtcctactttcttttttttctttctttttttttttttttttttttgggctccatgtgttgtggtgagacagggtttctctgtgtagccttggagcctatcctggcactcgctctggagaccaggctggcctcaaactcacagagatccgcctgcctctgcctccagagtgctgggattaaaggcgtgcgccaccaacacccagcagctttgtcctactttcaagggagtgcctctgctttccttcagaagccaccaaaacttcatggtcctctggctgtgcggcagctcagtttggggatgggtgccaggagcctgcacggatgccagaatgctttgatctcccatatccatcctcagagcctgtcatcattagttacaactcctggggcaaagtaaagtcattaaatggctgttgtgcccgatcatttaggaataatgacaagaaaaaagtctctgtgtttaggaaagatttgggttttcctcctccagtatttttggtccacaattagtgatcccacagtcaaaccctgagtctgtggtggccactggtgcctgagaattttctttgttcttcattgatgttaagttgttcaagttaagctgacagttcgccctttgtaatctacccctttcgtgcttgatataatgtctggtggtaaaggtaggtaggtatggtttgcacacctgtgatcctggcacctgggaagtagaggcaggaggatgagaaactcaaagctatcgttggctacgaagggagtctgaggccagcctagactacatgagaccttgtctcaaaacaacagcaacaacagttccccaaaaaccaccaccccaaaaaccagaagacgaagaaccactgactcaatggtagagtatttgcctaacgtgtgtagggagtgatcctgattacaagcactgctgaccacgcctacttgggctccgtcacaggtacttaagaggggtttaagagccaggggggacaagcacgtgggtctctcgctaggctgagctgactgggaagcatttctgggtccatcctgctcaggtggaaacctggtcactggttcccttacgtgagtattttcccctaataaactactggttattacctatctctgactgcactatgtaatcatcaatacaagtgcatgaccctgggttcagtttccccagcacaggtggggagagggccaggcacacacatttaatgtcagtactaaggaagaagaggcaggcaggtctctgagttccaggtcaacctggtctacatagcatgggcaggccagccaggaccctgtcttgaaacaaaaacaaaacaaaaaagaaaagaaagatgtatcttctatgcctgtggccagtactgccaccaagtagcagaaatctggccttgtcttcaggtgaagtgcctacctttagccagctcagcttagcctaagcttcgttgctttgctaagtttataagcgggtgtaagggtcactgttgtgggatattttcaccctcggacactgccaagactgccagtgaagttgactttgaatcagagggtggagctagctactagctgaccaaaattagccatgacctatgacatagagagagagacaggaagtagcagggagggcctgatgggggcaggagaacgagaaggccgctggtcacttctccactgtttctctgatcaatcaggctcttaccctgatatctgactctgagtttttgttgataaagataattacataaacacttcatgtcacaccagttccgtttgcttctctatcacatgtagtttaaacatcaccaggaggtgagtgtgcccgtgttccctgtcagccatcccagtacagctgtgaaccttagcactggattgggagccgagcaccatcactgtgaaaccgaccagtggggcatttggctcagatcccagtcttagctgacggtgtgaacaataaaatactgatgagtggaaactggcagatcaaacacacggagccagtgcagagcttcattggttccctcacctcagagaatgtcacctatgctgtttctgacttgcagggggcgcagtgaggctggtgcaccatccttacttccctgcagcagccagtcctcagaaggtaagccggggcctcgggtcggggttgcagctcagatgcatcgtccagcatgtgttttatgaagatgtggttttccttctaagagaagggattcccaggggaggtgagaagacagctggactggacagacatcgtgcctttggttacaggagaaggaggccaaggcaggagagacgacccagtgtgtccaggcccttgtcacgtacagagagtgacctgagttcaacccccaagacacacaaggatggcagtggactgagatcacagtgctgtcctctgaactccacaccatacacatgcatcatacgtgtacatgtcatatacacacgcataagcatataaacaccatcatacatatacacgtcaaacacacatacattatacacatggacacacatcacacacagacacatcacacatgtgtacacaaacatcatgtacacattatacatttgtacatacatttcatacacacattatatatttgtacacacacatcatacatacatataaacatatacatataaacatatacacacaaacatacatataaatacaaacatatatcatgcatgtgcacacacattatatgcacatacaatatacacatatatacaagtacatacatacacacattatatgtacatacatatgtcatacaatatacacatgtatacacaaatacataaaaaactcccaagggtctgtgagatagctcagcaggtaaaggttcttgcctccaaacctgacaacctgcgttcagtttccagaatagactcccacacatggtcctctgacctccaagtgtgtgctgtagcatgtgtgcagccactcacatacattatttacacacgaaataatgaataagagactatgttcggagggcacatagatcccatagggaactttcaagaacgccccgctattcccttcagctgtcccagcacctggttcatacctccactctaggggaacatggtaccacacgtaagtagttgcccacgtgactggtttcctaccagtggagttactcatggacaggactggtgttttcacatcgtctccctgcagccactgtgttcattacatgtcactaggcaaatgagagacaatcgtgaagggtgtgtctttgcatctctctctcttaaccatggggatgtgctcatgtattttatgcaaaatattttttctgagtatctgaatatggtggtggcacacacatgtaatcccaacatttgggaggcagagtcggaaagattaggagtgatcttgctcggttacttgagaccctacttaaaaaacaaaataaaaccaaaccaccaggaggcagatctctaagtctgaggccagcctggtttacagagttattgtgggacccaagagacaatccgtaatctgtaaggtcaagatatctttatacctgtaaccaacctctaacaggcgtggcttactgtccccttcacagagtgagttccaagacagccaggctacacagagaaaccatatttaaaaaaaaaaaaaaaccaagaagtcaaaacaaacaaataatctaaccaaacacttgcggctggagagatggctcaatggttaagagcactggctgctgttgtacaggacctgaatttggttctcagcacccccatggtggctcacaactgcctgtaactccataggtactgtatgcgtttcatgcacctacatacatgcaggcacacactcatacacatagaataaaataaaaataaccgcacacaaggaactacaagctataaagtggcattcattgcctggctctgctgtaaagggcaaaggaaaaataccatgctgaaggtcatgggtggatccgtgatcctactcaaggtctctccagcactgggaattctgtgatgaaagataagacgttttccggcattttaaggtgtggattatctatttcttttcaggagaaacttggaaattatttaaaaagaaaggaagccactgactagggctgtataccctttaacatcctctattgagttttctcttgtgctgttgcctagactcattcagacagtcctgcgtcagtgtgcctggcatatccacggggaccgtacttggtgctgggagtattggaacagatattgcaaacgaggttctgagtttacagaggtaaagttttatcattgcaaatattctcatataaatggctcttagttataaaccagtacagtgtgtgtgtgtgtgtgtgtgtgtgtgtgtgtgtgtgtgtgagagagagagagagagagagatccctcaggagggtggggcggagggtgggtgggtatgtacataagagtgttacacctacaggggcatctgatcccctggaactggagtcacaagcagttggggccacccacataaggacttttatactcttaacttgtcaagttgtctctaaacatcacaccaaatgcagaattcaggaagaaagaattgataaatgtaattgcataaaagttcaaaattgaagcaaaactataccttacaataaagttaaaaacataaactggaaaatgtgtgtattttgcatagtaaaacagactatctttaacttataaagaattttatatcataagtacattataaatttcatatagttatatgtaaacttcatgcatagcataaagaagagttattcaataactgtgtagggggctggagagatggctcagccgttaagagcactgactgctcttgtagagagcccgtgttcagttcccagcacccacataatggctcccaaggtctgtaactccagttctagaacacacatctccctcctctggctgctgagggtactgcacactcgtgatactcatacatgcatgcaggcaaacatgtgtggccataaaattaaaataaataaataaaagcaatttcttagaatggacaaactacattgaagctaaatagtgggcatgaagagaaaaatgcaagagaaaagccaagaaactttaaattgttcacttgcactcatatttaaatatacacatgccataattaagacagggttaggtactttttttcacttagattataaaagatttgaaagttttataatcttttgggagagattccccaattctttctgaagtataaattagtggagtaactttggatggcaattggacaagatgcataaaacaatagaaggaaaaaccaggtgtggttgtgcgtatctgtcacccaagtcctcaggaacctgtgctgcatccagagaatttgtctttaaaacaaaacgtactgaggtggggtatagtggtgcaagcctttaatcccagtgcttgagaaacagaggcaagagacagtctacacagtgagttccaggccagccagtgataccaagtatatctagtctgaggctcggaacaagctattttagccaaccgtgcaagaataagactgatgactgcactgctgaggtggcaggggccttaaccagctaagtaattccctccagggagttaggtagtagaatgctcttcatggtaggggccggagtgattgtagtgagatatccacctggcccgcacctgtgagtttagttctggggtctggacaggtggctcgctctcttgcttctggtcaagtcacagaggacagccagggcagatccttggagagggaacctgtggtggtcacctgcttcttgtgtaacttctccccaaataaagttcacttaacctgtatgtactgagtctagcgaatcttgattcccacacaataagtgatggcccagcagttagcaggacccaagttcagttcccagcactcacatggcagttcacaaccatttaaacctcaagtcctgggggatctggtgccctcttcagggctcccaaggcaccaggcaggcctgtggtgcacagacatcatacagggaatcactcatatgcatgaatatatatggtatatggggaaagggtacagaaatggagaaatagaaaaaaaaggatagtatgtgtgagcctgcacctcgcttgtttggcatcttagcctcaactacaagttctatgtttcctcctgttgaaggtttgcaaccagggatctaggtaatggtgaatctgcttgtgtgtcttactttttaaaaaactacatcttgtctgcttgttttgtgtatgtgcatgtgtgtgggtgagcgcgtgtcatagcatgtgtgagggtcagaggactacctgagaaagtcagttctcctgtgtgttccgggatcggcctgatggcaggagcctgtacccacttagctatctcccttgcctgtgtttcactttttaagtaaaataaaatgcccatggtggcatttgctaccttaaaatacacaggggctggagacatggctcggtggctaaaaacacttggtgatcatctagaggggaccccaatttattcccaccgttcccaccaggcagctcatagttgcctgtaactccagctcccggaaatctgacgccctcttctggccagtgaaggcccttgcacacacatgtgcatacacacatacacacaacataaatcaaaacaaaatcttaaagtgcacagctcagcaatgctccatgtgttgtggtccatactctcctgaggcttctccatttaaccttcccctccccaacttctcccacagccacagccacctcgtagttcctagttcctatttcctatttcctatttcctatttcctatttcctatttccttgcatggtttcagctctccagaatcaaaaataagtctggtacctagcaagtcagcctggttgtggggactgaggtattcagtgtggagctccttgctgtagtttatctgttggtcacgtgtgatgcatccagaggagaaaatttccttctaaaatcctgtcagagggataaatatctcttgtcccccttctcaggctgcatgcgtcatccccagaagatttaaatccttcagaaacagagggagatggccacagtgtgaactgcaggaacgccagtgtgcccgtgagtgaagaaaatgttcactggtcattacttcctttgagaaagaggccagtctataaaaataaatggacctttctggggacttggtagcctgaaggggcagtacaggtcagtagtcacaggagccatggttagaagaacacggaggggctccaggttgtgactcaaatctagtctttgtgacgttgggttcagaatttgaactctgcctcagtttccttacttgtgaggcaggtatggtaataacagcccctgggtgaatatgagaattaggtaatgggatataacccaaaaccactttttgagatggggtcccatgtagcccaggcctgggtgacttcaaagctagcttaggcaacttagtgagaccctgtctcaaataaaaaattttaaaaatgtaaaatgtaaagggatggatatacagcttagtggtagagctcatgcctggcatatggaaagacctgtttgattccggtaactggggacgctgaacctcatgctatctggaagtctgaaatagattataatcctagcgttgtgtagagcaaacaccatgaggggtctagtcagctctgtgccctgagagtgtgggaggaagacgatgaccgggggagtaggggcccgaaagtacaaacctcacatgatgattgtatgaacgtataactggtcttgctgtttatgtattcgtttattcatacatttagtgaataaagtgaccccataggagcggacatgtaagttattgtaataaaatcttctggcctctgcatgtgcacagctgtgcatacatgcaagtgcactcgcacacgtgtgcacgtgcacacacacacatacacacacacaatgcacacacgtgcacacatgcacacacatgcacacacaatgcacacacgtgcacacacatacacacatgcacacacaatgcacacatgtgcacacacgtacacacatgcacacaatgcaaacatgtgtacacacatgcacacacattgcacacatgtgtacacacatacacaatgcacacatacaagtgcacacacaatgcacacacattgcacacatgtgtacacacataccacacgtacacacatgcacacaatgcacacatgtgcacacacatgcacacacatacacacatgcacacacatttcacacgtgtacacacatgcacaatgcacacatacatgtgcacacacgtgcacacacatgcacacacaatgcacacaatacacacacatgcacacatgtgcacacacacatatacaaaaggatctcgactttgcagtaggtgccttggtttggaatctggtggtgacagggaacggctctctctcggctctttgagctgcagctatggaaatgtgtgggtatcacaggctgtgcatgaggcaggtcctcgggaactgtaatggaggttctggtgccggccggctctgaaaccacccagtggttctccctgtgctcaaggcttgctgaccggtcctgtcctgtctttccaggtgtccaggaaggagcacttttcaccgagccctgaaacaggggagctggaggctgccaggcacccccagatcactgaagctgcccatactcaggggtcactcctcagtaagttgtccctgtcaccggccacgatgtaacctttccaaaacctctttctccatcactgagttcttatgtgcaggagattttcaaagaaacaaatggctgtttttgtttttgtttttgttttttccgagacagggtttctctgtgtagctttggaggctgtcctggcactcgcactggagaccaggcgggccttgaactcacagagatgcccctgcctctgcctcccgagtgctgggattaaaggcgtgagccaccaacacccggcgcaaatggtttttaaagtaatattttttttccaccaggcatggtgacacatgcctataatcccaaaacatgggaggttggggcagaggattgctatgagttcaaaaccatcttgggctatatagtgagttgtaggccagccagggctacatagaaagaaagccacccccccccaaaaaaaatccccaagatttctccacttggaatcctaatacaataatcagcaggtattactttttaagatttatttatttatttttattttatgtgtgttgttttgccttacgtccatgtctgtgccccacatgcgttcagtaccctcaggaaaggtgttgtctcccctgcactggagtgacaggttgtgagctgccacatgggtgctgggaatcaaacaagggtatgaatgtcactaacagcacattggccacgggtcaatcatcttaagggaaagcatgcctccatcagactgtgaggaccctgtgcgtcactcactgacccattgtgagagtagccatcagctgagccagctttggcctttgctgaatacacataacttaaataaaaacttaaaagtatttccacctaggaaaaagtcccttctcaagaattatcaagaaatttaaaaagactcatgctaaaatataaaataaaatataaaggtaggggtcacagagagatggctcaatggttaagagcgcttattgctctcacagagaactcgggttccattcccagcacctacatggtggctcgtaaccatctgtattaactccagtcccgggggatcgaaccccgcttctttctggcttcctcagtcaccaggcacacacatagtgctcatatatacaaacaaaacactcagacatataaaataaataaatctaaaatgcttttttaaatttatcttttatgtatacagtgttctggcatgtatgcatacatgccagaagagggcaccaaacctcattacagatggttgtgagccactatgtggttgctggaaatgaaactcagggcctctggaagagctgccggtgctcttaacccctgagccacctctccggcccactaaaatgtttctaaagtgtaacatttaatcgctcactttaaagtgtttatgcaaagtctgaatcatgcaaatgcggtaacctggcttctcacctcctgactgcactgcttccatccatcaggttctcctgactttgaagagacccggaaaacttggattgctctctattgtattttaacctttgctctccagaacttggttgtatctcgaacttaaatgtcacctccagctccaccctcacttccttttttaatctccaactcctcacatgaaaactgtgctttggaatttgatgctttctccccagcttcacattttagcatgaaacaagaactttgttcacagtacagatgaatcaaatatcttccgggcccctgggcacacagcctctaactcccaacagcctgggagtctgtgtccgtcatctagcagtgtgattttctactacaaaatgcacaaaactggctcatttagaaaaatgtcaggacagtgttggagagatgatggctcagcagttaagagcactggctattcttcctgaggacctgggttcaattcccagcacccacatggcagctcacaactgtctgtaactccaagatgtgaaaccctcacagagatacacatgcatgcaaaatacaaatgcaaatgagataaaaataaattagtttttagaaaggaagaaagaaagaaagaaagaaagaaagaaagaaagaaagaagtcagggccctggagagatggctcagtggtcaagagcacagactgctcttgcagagaggacccaagttcaattccccgaacccacatggcagcccctctggtactgcatgtacacgatgcatagacatacgcgtgggcaaaacacccatgtatataaaataaaataatatagaaatatatccagatttgcaatttaagacatattttaccttcccaaattgtaccatgtgacctctgtctggctttatctttttttattttaggtaggtgttctaatttcattcctgtcacaacaatgagaaaccttgacaagaaatggctcaggggagaggggtctattttagcccacagttccaggtcaatggtgcgtcactgagggcaagtcaaggcaggaacttgaagccatttgtcaaatccataatcaagaacagagagaaatagttgcatgctcagcttgcttcttcatgcttacaccatttagggcccagtccatgggatgataacaccctcggtcagggtggcgactttggcaaaggtcttcacaggccttcccacaggtcctcacagacagtccctcattgagactctctttccaggtcctggagtagcaaggtgacaattaaagctaagcgttacctcttgtatcccaggttgggctcaaacatctatgttgctaaggatcaccttgaacttccggccctcccgcctcatgctgggataacaggtgtgcacagccacacctgatttatacagtaccaggcactgaacccagggtgtcatgtatgctaggcaagcacttccccagcagaacctcagcccctgccaatggcttgctgttcttgactacagttatattatttaatgtgtctgagagacttgcctacacatatgtctgtacacatgaggccagaagaggttaccggatcccctggaactggagttacaggtgtttgtgagctactgtgtggagctctgttagagcagccagtgctaaaccgtttctccagactctgcccacagtgctcccctgtactgactcacgtagctggtgttattttattttattttatttttacttacaggtgatggtgcccagctggactttgatgcgctgtgtgacaacgaagacacagctgtggctgcatttatgaattacctcgaagcagaggcaggtctgggtgaccctggggacttcagcgacatccagtggacactctagcgtttgaactaacatgagagtcgtttcagagtgtcccatttacaaaacactccgttcttccgcactgtctccatacttcctatctcctactgatagtctaccggtttttatacagccgcaccttcctctcacagggctgtgggggagtaaaatgttttcctccacggctaaacagtcaagttcatcaaactctctttacttagtgagctagcctggggtcaggctgtggtatttctactaaaaccttctgaccataaaatgctgccaaccgtattgtttgggctttgcttcttctttttctttgtctagttttgtttttgagtttgggcattttaatatattgacgttttccttgtctgtggcctaagagactgataatgtgggctgtcacgctgtggcatgcgcccatgcttgagcttttccctaacggatgaaagagctgggtgcttctggggtatggtgagtacttgaacatttaaaggggcagcacagcctgaggtcagactgacgatgagctctgtacattgagcctttgtaggacttggcaagacttgctaggatgttgaggttctttcggctcaagaagaactttgagggagaggacttcttgaaacacagaaaaggccaaagttttggctttgtttacgtaagagggtggaccctgagcccttgatcttggcaatgagtctttgcaagaggatgatataatcactaaggattttcactgtaactagaactgccttgctggtttctcctgttgaagctggcttatcaatagatacggcctggaggataaatcaggcccaggcagattaaatgccctgtggaaggtcccaccttaaattcataggttgttagtgcttaatgtagataagccagtttcatttgtaaaggccacagacttgctagttccctgatgaccacactgacctaggaaacagctgtagcctgctagataatcagtggttagtcagcattgcctgcagccaaagaaatgaaacaaatggtaaatacagtcatttgttattgttttgttgtatggatttacttggggtttttgtttgtttgtttattttttgaaacaggatctgtgtagcccaggctgttctaaaacgtactgtgtaggccaggctggccccctagagatctacctgttgctgcctcccaagtgttgggattaaagccaaacatcacaattcccagattaaacacagtcctttaaatcaggaggcaatgaaagatcacttaaaagccaactttcttgtaataatttaaactttagaaggcattttaaaagcagtaattaacccatagatgcttctgatggagtgtaagaattaagacgatttaaaattttggcctaggagtgcagctcagttggtagagagcttacctagcgtgaacctgggcttggttcctagcattgtaaaccaggtgtggtgatgcacacctctaatcccagcactcaggaggcaaagacgggaggatgggaagttcaaggtcagactgggatccacaaaaccccatctttaaaagtaagtaaaatgagaatattgcttagatttctatctatctgctttcctgaagaatcatactttgttttgttctgtgtgcatgggtgttttgcctgcatgtatgtgaaaccaatgctcacagagcatctctccagccccagagtggtactcacgtcctcacatttaactgtctttgctgaacactggaacggacccttccttgtgctttacagagtcactcaggctggaaaggaacagggaacctcagatctaatgcaggtccagacccacttttcttccctgtggtcctgcatcttcccagggaagccactctgcacccctcaccctagtgacctcttgtgaccttgtgtgcgggtcattcacactatagatgatcaagcagaactttcaccaggtctgtgactgacaagcgtcgccagcttgccagagttcctggtgtgcagttttgtagtcactgggtgcataaggttgtgtcagcacgctgtccccttgagctgacacaatgaccttgttgtgggacattttgtcaggtgtatgttacaaaatggaccaagggttgagggatgaggtgattcactattgtaaccccagtccttagagactcagtcaagaagatctctgagaattctgggccagcctaggctacacagtgagattttgaagttgccatgaattttattatgtgatgatagcctggaattaaataaaacttgagttggatattgacatcatatggtcaataaatacatatatttattgggagaaaaaaaacaccaggaaatgcagaagaaagagggactggcaaaatgaggagggaagggttgtttgtagtgtcccactaaaaaagtcacgcctgcagccccagtattcatgaagttgaggcaggagggtcactgttagtttgaggctagtctgagtcatatgatgaggctgtgctctgttgaaatcagaatatataataaactggcattgaagtctgcaggatcgctgggctcagcggtgggggtgttagcctcctgtgtccctggtgtcacgtcagggctgacagctagaactctccagaagctaccagaaagagctgggtagctattatatgcctctctccctcctctgaggggctttctttggattaattcccaccccggggcctgagagacattggtggcctccctgtctggaatgcagtggccctttggctgttgagagatgtctgtcagaggactcttgagggttcttctcatgctgtagagagaacttcccagatgtgccagccagtgcaaacctcagagaccctggctggctggggtgccctctgacctctggagagctgtcatcatgcaacgtctttactgaggatttgtatgccacacccaacactttctaactttcttgttcttgtctatatgtatttactatttttaaaagtctgtggtagataataaaaagagtgaaattatattttatacggataactagtttgtgggtttttttaatttaataaactttctccccttgacgacatgaactagtttctaatgtagaaccacagattaagaaaagggttggcattaaaatcttgagccaaaacccagtggtggtgaaccacggctttaatccttgaccgtttagattacaatttgatggtagatttcccactgggccacagcgtttccttttgtcttatctcttctttctggaatgtttttaaaaattgataattttttgtatgtacttatttatgaaacataaaaacagtaagtagtggagtggtgatttgaaagaaaatgactctaagggagtggcactgttaggaggcgtggccttgtctgagtaggtgtgtcactgtggaggtgggctttgaggtctctctctctctctctctctctctctctctctctctctctctgtgtgtgtgtgtgtgtctctctctttctgtgtgtctctctctgtctctgcctctgtgtctctgtctctgtctcagaccacttcctgttgcctgcatgtcaaaataaagtaagtagttccagctccagccccatgtctgcctgtatgccaccatgtcacaccatgatgacaatggactaaacctctgaaaatgtaagccacccaattaaatgtttttctttataagagttgctgtggtcatggtgtcccttcacagcaaaagaaacccaactaagacaagtggctttttctaacttcatttcctttttatatgtgtgtatacatatatggccctccagtaaatgaactacattgggttgcacttaggaatggtttcagtttcagtgtgtttagcgtcctgcctgtattaattagggttctttagagtaacagaacttgtagaatgaatctccttacatagaaagggtatttattagaatgatgttcaggctgtggtccagctagtctaacaatggctggctatggatggaaagtccacgaattaaaagttgctcactccatgaagcttgatgtcttggctggtcttcagtatacattggaatcccaaagaagtagactctactgccactgaagaacggatttgctagtgaggggagagcaggcaggaaagagcaaacgctttcttctctgtgtcccttatctaggcttccagcagaggacatggcccaaatctagattaaaggtgtgtcttcctacctcagagatctggattagaagtagattttccctcttcagattaagcagaaatccctcacaggtgtgccctccattttcaggttttagttaattccgtacgtagttaagttgaaaaccaagaatagccatcacactgcccaaatacctaggatttatacaagtccacttccagcaggattgtgcttggaatagcccatccagtgctacggttaattcttttggtgcttggagtagcccgcccagtgctacagttaattctcttgagctgctgatattctggggagacctaaatctaacccatatttgatttttcttacttcaggctcagatcctagccccactgaagatgcatgatggcatcaccgttttacacaagaggaaactggaactcagagttgagcagcttagcagcgtaacccaattcaggtgctgggttggagacccagacccaagcagtctagactgctgagcttttaaacatatatctgtttttattttttaattatgtgtacatgtgtgtgtgagtgtgcacacgagtagaaatacgtgtgtgcacacatgtatgcacacttgagtgcagtttcccgaggaggccagaagagagcatgagatccccctggaactgcagtgtaagcatttgtgagccgcccactctcttaaccgacgagccacctctccagctgcccagccggtttctcacgcgtctgttatgttcactaacttgataagacacccatggatctttctagttttcgtcactcccttaactccatacacagttgttttgtttgtatgaggtgaggtctcactgtgtagcccacgctggtctcacagttctcattggtgctgacactttgagcctgtgttgctctaatgttttctaattgtaaaagacataaaaatgtactatcctacccattacaggtacagttccattttgagcaatagccaccccattctgtggactctagggcttctcggcacactctgaatgagttgctgtcaccagcagccccctactttgttcctatgtgtctgtacaaagccactgtgaagtggatttttttttcaagtggctaatttcacttcccacactatcctcaaggtttattcttcttgtaccaggtgaccaggttttcttctttgagattgtgtaattatgtcgtatgcacccattcacccattgtggatagctggatatttggggcttctctgtcttagctacagtgaatgtgatgaaggtggatatgtagatatctcttcatgatgctaatttctgtgtgtgcctacctgtcacccacctctatccatatccatctggcatccaccaatgcatctatctgttcatctgtctatgtatctatcatctatgtaccacctatcgtctatctagtctatatatgttatctatctcatctatctgtctatctatgtatctatctatttatctatctatgcatctacctatcgtctatctatctagagagagaaagagatgcagtaggattctattataaacatttttttttttttttggtttttcgagacagggtttctctgtgtatctttggagcctatcctggcacttgctctggagaccaggctggccttgaactcgtagagatccatctgcttctgcctcccgagtgctgggattaaaggcgtgcgccaccaccgcccggctctattataaacatttttgcagcacctccacacaactttccatacagtttcactattttatattattaccaatagcacacaaggttgctagtcctccaccgtcgccaactctagttactggctttccccacccgtgttcatcctgatggaccattggtaatattgtggtttcaatctgtgcaaatcttgttgtcttttgtatatattctttggagaaatgtgtgttcaggtcctctgaccacattttgagttcattgtgtttctaaatttttatttttatgtgtatgagtattttcctgcatgtctgtgtattccatgcatgcaatacccaatgaagccacctggggatcacggaactagacttacagatggttgtgggctgccttgaaggtgccggatcaaacctgatttctcaggaagagcagccagtgatctgaactgctgagccatctctccagccctctttttattttgaatgctttgatctgtgggagcacaggtgtgtgccgccaaagcctgctgatccttataattcttgatgcctgtgttcacacagctgtggtgtgttcacacatcttgtaggctggtcctttttaagagattggagaagacaaaacactaaaaataacactagcagtgactgtgaccaagcaaggcaggaaaacagcttcagacttagggtttttcagtcacctaagttcacagaaataccaattaaaaagtcactgtggcctgttttgaccgatttgtttttttcccatgtagcccaggatagccttttcccatgtagcccaggatagccttttcccatgtagcccaggatggccttttcccatgtaactcaggatggccttttcccatgtagcccaggatggccttttcccatgtagcccaggatggccttttcccaagtagcccaggatggcttttagctcagtctgctactaaagatgaccttgaacttctgatcttcctgcttttctttctggtgttgctgttacaggcctggtccatcatgccagactggctgttccttatagcgcatgctatgtatgtgctgctgaagaacagagccatcgtaaacatagttttttcatcaaaaagaacggtaaagagccgggtgctggtggcgcacgcctttaatcccagcactcgggaggcagaggcaggtggatctctgtgagtttgagaccagcctggtttacagaactagttccaggacagcctccaaagccacagacactgtggcaggagaatgggaaatttgaagccagcctgggctacagtgtgactgtcaggagagagggatgtaacatccacagtggtctcgggctgtgccatccgtgtctgatgggattgctttagaagcacacacatcaggacaggttgacagagtgcagggccctgccgcactccccacaggatcatccgtgataggttgggaacagctcatccggctcaccaaggcttctccttctgcatgactggggagtggctggctcctccagcctgcaatcctctcattcgtgggatgtagagaccggaggctcgtctcctgggctcagcaagtaaataaatagaaaaaaaaattaaaaacaacaaaattcccccacaattttagggtcagaatagagacagcttcccaaatagaacacactgaacaaacagtggatgacccttttgcccacgcacccacgttgtctttgtattttcagaccaaggaaaagaaaactggctggcgtttggggaaaacaaacttaaaacggctttctcttttacctctataattagacagtctacaaataacgctgaaagcccagcaggattgggactttaactacggagtggactaatgactgtgatagcttaaggggaaaaaacactatggccgttcccagctatgaaccggtccaatcttacaaaaacagaaccggggtttctaagatgtgggggctgcctggagtcagacaagaggctgtccttgctttccggggcagaggcagacatgtgtagcaggctgcctaacatgggtcatgttcagtgtgagccaggctggcatgctcatgagctccctgtaagctttccattcagggaccactcgccgtgttgaggtcaccatgaccacagtctagtggttctgagtcagcactgtgagcatctgagacagtcctgctgtgcacctagagggagcggccactagatgccatcggcaactcagtgtggagaccaaaactgtgtctatggactgactgcctggaaccctgagtgccccaaaggagggtcaccctaggctgtgacggtttcactttcctttgtggaacaaggaaggtgggggaagaggaagcgtgacaccctccccacccctcccctcaccccctcacccatacactgttgtcctccatggagacctaggctctggtggctctcggccctgcccaccagctccctgggtggttggtgtctgaggtcgtgattcttgctctgataggagggaggccaggagcctctcaggccagaccaactcagtgacagtgggtcaggtcacgcccctctccccccacccgcacacgcaccccttcctgcaatggccagtttggcacagcctgggaagaaaggctcagggaggaatcgtcctgaccgggttggcccacggtgtctctgaggtgtcttcatagttagctgaggaggaggcacctgcctgagtggacacacccgtcctgagcacatgcacacaagcacgcattcatctccctgctcctgacacggctgtggcgggactctgacgttctgccttgacttcctcaccatgagggacgtcacctgctctgcatggtgagttcaagccagccagggctccctggcaagacatgttctcagaaaaaccagccagtccattgatacatacagccagctgtcaccactgtgtcacttcccctgacatgtgacacttcccctgacatgtgtcacttcccctgacatgtgacacttcccctgacgtgtgtcacttcccctgacgtgtgacacttcccctgacatgtgtcacttcccctgacgtgtgtcacttcccctgacgtgtgacacttcccctgacatgtgtcacttcccctgacgtgtgtcacttcccctgacgtgtgacacttcccctgacatgtgtcacttcccctgacgtgtgtcacttcccctgacgtgtgacacttcccctgacatgtgtcacttcccctgacgtgtgtcacttcccctgacgtgtgacacttcccctgacatgtgtcacttcccctgacgtgtgtcacttcccctgacgtgtgacacttcccctgacatgtgtcacttcccctgacgtgtgtcacttcccctgacgtgtgacacttcccctgacatgtgtcacttcccctgacgtgtgtcacttcccctgacgtgtgacacttcccctgacatgtgtcacttcccctgacgtgtgtcacttcccctgacgtgtgacacttcccctgacatgtgtcacttcccctgacgtgtgtcacttcccctgacgtgtgacacttcccctgacatgtgtcacttcccctgacgtgtgtcacttcccctgacgtgtgacacttcccctgacatgtgtcacttcccctgacgtgtgtcacttcccctgacgtgtgacacttcccctgacatgtgtcacttcccctgacgtgtgtcacttcccctgacgtgtgacacttcccctgacatgtgtcacttcccctgacgtgtgtcacttcccctgacgtgtgacacttcccctgacatgtgtcacttcccctgacgtgtgtcacttcccctgacgtgtgacacttcccctgacgtgtgtcacttcccctgacatgtgacacttcccctgacatgtgtgacttcccctgacatgtgacacttcccgtgacatgtgtcacttcccctgacgtgtgacacttcccgtgacatgtgtcactccccctgacgtgtgacacttcccctgaaatgtgtcacttcccctgacgtgtgacacttcccctgacgtgtgtcacttcccctgacgtgtgacacttcccctgacgtgtgtcacttcccctgacgtgtgacacttcccctgacgtgtgacacttcccctgacgtgtgtcactccccctgacgtgtgtcccctgacgtgtgacacttcccctgacatgtgacacttcccgtgacgtgtgacacttgacctgaacatgtgacacttcccctgacatgtgtcacttcccctgacgtgtgtcacttcccctgacgtgtgacacttcccctgacgtgtgtcacttcccctgacatgtgacacttcccctgacgtgtgtcacttccctcacttcacctgaacatgtgacacgcggtcctgttctgaggcagcagcagcagcgaggaacagcacaggtcatagggtcccagctcctttgcggttcctgccaccccacagctctcctgaccagcagtgtcagcgtggcctggtgtgagccccacacagcgggtgccatgtacacagagcaaagtgctcaggcccctcctcaccatggctgcaaccagggccggaccccttgaacaagagagccaacgtcagccacgcctggcccagtaggggcgccacactcactgagggtagacagagtgcaccccacactctgctgtcttcacgagtgtccccacttgtgagccctgcggggacatgatgtgcaaactcaccgcgtcaggatttctgacatcacagcaggagctcagaacagccacacacgagcagacacacggtaactacgagggtcctgcccgtcccccggtctccaaggcagagactttggagcttggccaatgctgcttgtgaactacggccgtcttgagtctgtgaccactccccatcctgctttcctctggctgcaggaaagcaaaagcaaagaaaaatggagagtggaaccgaaattaacgttttctctttgtgtcagaacggcggactgcttgatctctagacagcatgcttgcgtgtccgtttaaccttcgccacagcctttgtatgaagtggattggcaaatgaactattttttcatttatctgtttgtttccattgtagcctgggctggccttgagctggctatacagctaagatgaccgtcaggttctgatctctcctttcctctatctcccaggtgctcaccgccgtgcccaggtcacggggtcggaacccagggcttcacgcttgctagccagcacagcacctaccgaccgagttacagcccaaggctgacaggtgaactttggacagaagagtctgcttagcatgaccagatgtagggtagcgtttgcatccaggaagattttctggtctttctgacccttcaccttgaagacctaagattgtcccagatcccggctgctctgcaaggtttttatgggtcaggcagccgcgccactccatctgaagttatattcagatgattataattagtgtccgccctcacaagcagaggctgctgctgctgggtgagccgtgagggtcgtaaagatatttcttgtaacttcaatcaaagccgatggctctctgcacaaacatttggatgaggaggcgttctgtgctctgggcctccagaggcagccagctttcgattgcaaagacattcccagagggcagaaagttgtggcatcagttgtgcccaggacagggggtgctggtggaaggttccagtcaacacagtgagtgtgtgaaagccccccccctctctgcttccctgtgggggacttttcctcacctttaaagcacctttgtctcagatggagttacacattgtgtctgaggagttacttaaagaacagagagatttaataaagccactgagcagtcaggcactgtggtgcacacctgtgagcccagcactcaggaggctgaggcaggagggttgctgggagggtcagtccacctaggctacatagtgagaccctgtcttaataaataaaatgcaggcactatgtatggtggaacactcctatattcccagcatttgggaaatggaagcaggaaaatcaggaattcaaagtcatccttggctacatagtgagtttgaggccggcttgatctacgtaaggccctgtgtcaaataaataagttataatataatataagtcaaccaagtaatccattggcaacacaaaccctgtcactcttggctttattcattgtcactaaggttctctggcctcccactgctcccataacagaaccacaggagtttatgaagccagcacttcccccataaacaaccaagaggagattctccttcttggcttcagtgccttgctacctatgtctaaaatctctagcccaaactggacgtggttgtatatgccttggaggccaaggcaaggagacctcaaattaaaggccagtctggaatattcaaaaagacccaataaaaaccaaagccaaaacctctcgagccatatcacacttgcagagatttcaaagctcagagcagggcccttgccagcctttctccctctcattcgtctttcagttttaggtcacggtcatgactcctaccaggacagcttcccctcagccgaccttaccgaaagtgctgttgttatctctgggagccacgaggagaagtgtggggttaagctgggtctcacaggcccatggaggtcattgccctggaagccagcctgtttgtcctgtgctgagggtcataactggtgtcctgctctgacttggccttctgatgtgtgatgggtatcccacttgtgaacttgccctgtggggacttcagaaagtagcagagggggtccttcactgctgaggaggatgctgtgtaaacaaacatttgtttgtcatcccaagtcttcttggaaatcgttcttcaaaggcagtagattagcatgagccaaggttctcagagaaagctctgccaggcacagcagagtcacaggcagggatgatcccctaattagttaggcactgtgagataatctcaccaggctggtgagatggctcagtggatgaaggcgcctgccaccaagactgacaacccgagtttgattcgctccccaggggctgcccccatatgagtaacgttgcatgagcttgtcccctccatatagacaccgaccatacaaatgtctgcgggagatgtgtggctccagagaagctgaatttcaaacacgaacgtgtcacataaatttgaggaaacaggagaaagttaaggtgtcatgagcttggtctttgtaggtaaaatggctttcctggctttgtatgctcagtgctacaaaagtgcctcctgaaaaggcatcacccccatggagacatttcctcggggaagtgaaggaggagctgtagaattttcctgagacattgctctgtctgaaggggttcttgattttggtagactccaaactgccaggccagtccttcgtcgtcttctctcctgtggatgacagaggcacgaacacaaacacgcctgtctttgtttcatcaccattgtccgggctttgtcattttgggttctccttttagacattcagaagcagtcagttctctcctctgttctttccacctcctagatggtggtccctggggagctgcagggtcggggcccctgtgcccctctgctcacattgtcatccgcggatcaacccatagccttggtttatgtgtgctcctatttaaagacatattttgtatgtatgtatccagggctggtcttgaactcatgatgtagcccagaatgactttgaatttctgatcatcctgtttctgcctcccaaatgctggcatcacaggccagcaacaccacgcccggcttttaacattgttgattcattggccttgaactcagcagccagcaatgctgaagtttatctttgccttttcaccctgaaggacactagccagcagcccaaagctgcgcttccagatgcaaggctgcagaaaataacagatgtagaatctgaacagtgtggggtggggtggttgatgaggaataactaacaggtcacccttgtccttgtgcccggccatactctaccagggcacaagggctctctttttcagccttctcttctagatccttcctgggcctgtcttcctgagctggtatgttcttagtggaagcctctccctccccactgctagtatctagtcctctccacggccagtatttgtgagtcaagaagagctggatacagtaaatgcagtcctaataaagaagtcctaggttgggcagtggtggtgcacgcctttagtcccagcactcggaagccagaagcaggaggatctttgtgagttccaggccagccaggtctacagagtgaagtccaggacaggctccaaaactatacagagaaatcctgtctcagaaaacaaacaaacaacaacaaaagtcctagctggtgtggagcttgtagtttataaggaacccttcattttaagagaactaccgcaggacagggagggccctcagtaataaatttactcctcacatcttgttgtaggagggactcactagtttgagaatttggaattttcttcctaggcctgtggttataaactgggccctggagtttgatgtcagtggcctcagagcccactctccctggacatttcaagataataccttgatgtctaaggagaagctgagacacctcaatgtcccaggagaggtaacgagtctggcccaggtactcaggtaggtgaggctctggagctgaacttccagcgtgtccctggcctcagagcacagcgtctagaaactgtgtgaatgggagagtcatcccatgacattcttcctacgtggccaggattctgtagcatggttatccagtctgaaaagagagttctaaccagaccctgcccagaaaaagctgcttcccctctgggcttccgtggctgtctgcaagctctgaaaatcttcacattagcctaaagcccggctagagaatagagctctgctcatacgtatctccttaaaaaagtcacagatattcaaacatcaaagagaaaggctgactggagcagttcccccaccccaccctgctgcctgcctcatggaaatgaactgaacagcaggaagcaggagtgagaggaaaccgggtgagggttggctgcacattctcccttcccccaagccctgtgggtctgacagccgtgacttctgggctccctctgcctccctccccagggagacacagccgagcaaggatggaaactgtcgtaggaagccagaagaagcttgcctcttcttatttaatgttcattttagtctgtttttgacacctgtttcccccaattgcagaaggtgttaagctcatcatgaagatacccgacctcctgagagggttagtaacaatagataacgtaactttctgtgtgtgtgtgtgtgtgtgtatgtgtgtggtgtatctgtttcatatgcaccggtactctcagaggccctgagggagcaccagagttcctagagggatgcttgtgagctgcccaacacagatctggaaacaggactcactttgtattattcactttgtatattcactttgtatgggtgagtatgtgtgagcatacatgccacagcatgtgtgtggaggtcagaggacaatttgtgggagttggttctcttctcccatcatgtggatgcaggaaattggattcaagtcatcaggcaagtgccttaattggctgagccatcttgctggccctgggtagggtttttgttgttggttttagtctttttaaggcatggttttgccatgtgatccagggtgacctcaagctcatgtatagcccaggctggactcactttcagtctccctgcttccctgagtgttgcggggtcaggcatgtgctccatgctcagccagggtgagtgtgtgcggccagtttctcttaaccaaatctactgtaggttattttgttccagttatcatagtcaaagctggagttgcgccaaaagaaggcgcagcggggttcctgcaggaaaatgtgtggaagcttctggagagggggctgggtggagaaatagcgagtgagagttgtgggccttcgtgaagagagcaaggggagtcctgaagcacgtcttagccacagctgcacacacagtcttggagggctctggggcagcagtggcggaccgctgagccccgggtgattctgcccacatgagccgcctccacccagaagtctctgttctgaagctccctgttcactggcaaatattccgtctctcagcatcctggtccaggggctcctggtaccctcactaggtccccctcctttggcaggtggcattccccacagacctcttcagtgtcgtcattctcgtaattctgtctcaaagtcccctccctgagaatggagatttattgtgttgtatcttattttgagaaagagcaaaatatatagttcagactagcttttagcttgccccggcatcccaagtgctgggattctagacaagagacacagcaactagaggtgacatttcttctttctttcttttcttttcttttcttttcttttttttttttttttcgagactcgatttctctgtataacatttggagcctgtcctggaactcactctgtagaccaagctggccttgaactcacagagatccacctgcctctgcctctcaagtgttgggattaaaggtgtgtgccacacctagaggtgacatttctttgttgcatgggaatcaagattcactagacccagtacatgataaaggaggtttatttgcagagattacacttacacaagaggcaggtggctgtcacaggttccagctccaaggatcctcccagaccagcattgagagctcgtgcatcccaaagccagcctaaatcctcccctcctgtacacaactgtgaccacgcccaaacaggcaaggtcagtgccacaggtgctgagttagatctctctctacatttctttctttcttttaaaagatgtatttatttattatctatacagtgttctgcctgcaagtttgcctgaaggccagaagagggcaccaggtctcattacagatggttgtgagccacatatggttgctgggaattgaactcaggacctcaggaagagcagccagtgcccttaacctcaaagccatttctctagcccccgaggtgacatttcttatccatctgtcatatatctgtgtgtactcgacggttttgtgtgtcaacttgacaccagctagagtcattagaggaaggagtctcagctgaggaaatgcctccagagatccagctctaaggcattttctcatttagtgatcaacgggggagggcccagcccatgatgggtggtgctatccctgggttgctggtcctgggttctataagaaagcaggctgagcaagccatgggaggccagcaagctgcttcccttcatggcctgtgcatcagttcctgactctgggatcctgccctgtttgagttcctgtcctgcctttctttgatgcggaagtgtaagccaaattaaccctttcctctccagcttgcctttgggccgtgtattttcccacagcaatagaaaccctaagacactgcgtatgtatctactgtctatctgtcatctattaagtttgttaattattactgtgatcaaatacctggcaggagacagcgtaatggggatggggcttattttggcttacagtttaggaaaatacggtccatcatgatgaaactgtggcaggactatgaggctgctggttgcgttgcatctttatttgggaaccagcaagagatgagtggtacttagcttggttgtttttatccagcacttagcccgtaggacagtgctacctacacacaggatgggccttcctccttcagctaaacctttctggaagtaccctcagagacccccaggtgatggacactcgcccatcactcagatgtgtgtttccatggtgatgctaagcctcatggtgttgacaatgaagagagatagttaccgcactgtctacccatctgtctgtggatccagacagtaggtgtgtggacaggactgggtcttagaaacaggagcagtcgcagcacgaggcaaacaagaaggaaagaggggagaccacatggtattggctgtgtgacttctccagggaaatcaaaataacccatgtctattcacccaagataaagaggacacccacagaccaaggcaagattgtggtggtatttatttatgacttattaaagcttgcctgaaggttcagaaagcaaagtcagacacaagccatagaagccaggcacacacctctaatcctaggacttgggattaagaggtagacagatctctgctagttcaaggcaacactgactacatgaaatagatccagtgctaagagaaacagctcacacaaagatgatctcagcacttggtatcacatgcctttaatctcagcactatcgaggcgtaaaagacaggaacagggtcttcagtaggctcagactccggattctccagccactctggggagaggcagcagtctgaggcttggtggagagcttgtggaccagccctatcagcaggagctagaggtggcagccagtggccaactgcttttctttcctgatcttcagcttgaagcttgaaccccaatatcagcctctgggtcttttatttatcatgctacacaggattccatccaagggtgacttggtgaaccagtgagctcgttcatgttacttcaggagcatgggtaattcttgggcagctgtaccaccatgaagtcctatactccacatgtgcagctcacataaaactgaaccttgaagaggcaaaccaaaaacaattgcctgtcttttacataaccacagggagaatctcatgagggccttcaagcctcttctccctctgtgaaggaaagttaagaggacccatctcttgaaggtctcgtttgcttacagctgcttcgatccaagaggacaatagttgtgtccagccttgaagaaatagttacactagagggacaatattataatagtgtgaacttttaaaactccagtcatagcagacaacaccagtcagaggaacaggtgagtgacctgccagccagctgaactgccccactccctggatcaggtcccaaagacccaacccactgccccccctgtcccaccccatcccctccactgctgagaccccaactcaggtggacttctgctgcccaggaggaggtcacaccagtcagaagaacagataggtgacctcaggcagagactccttgctggaccacagaccacccctgcttccagaaccagagacaggcatcccaccagtggatcctccactcactcagagctccctatcccccaccccttcctcattaccccacaacttgaacagagacctcctgctgtaccaaagcccaagtttaccatcagaagtccagccccctatttggacagagactttctacttgaacagaggtcacaccagtcactaggaatccaggccacaaagacctgaagaccaaagaggaaacagaaaccaaggaacaaaacacccatacaacaaagacaaactcagaaatcatcacctagacttacaatcaccccaagcccagattcgtgaacaccagtgtaagaacacaatcaaccacagccagggcaatatggcaccatgggagcccagcagtcctactacagcaagactattccagcacagctgaagcacaagaaaatgacttaaaaaccagctttatgaaaatgatagaggtccttaaagaggaaatgaaagaaaaaatcccttatagaaatggaggaatagagaaagaaaatatttggagtatatcaataaatcccttaaagagtgacaagaaagaaagccaagaagggaaaaaaaaacagataaaggaaatgaacattcatttcttaaaaatggaaatagacgcaataaagaaaacacaagccaaggaattctggaagtggaaaaatctagaaaagtggcaggaactacagacacaaccgtcactaacagactacaagagatggaagagaaaaatctcagatgctgatgatgcaaaagaggaaatagattcatgggtcaaagaaaacattaaatctaaaaaaattcctgatgcaaagcatccgggaaatttgggacaccatgagaagaccaaacctaagaatagtaggaatagaaaagggagaagaatcccagatcaaagacccagaaaatattttcaacaaaatcatagaagaaaaccttcctaccctaaagaaggatgtgcctacaaagatacaggaagcttacagaacaccaaatagattggaacagaaaagaatgttccctcagacataataatcaaagcacaaaacacacagaacaacaacaacaaaaaacattattaagagctgcaagggaaaaatctcaagtgtcatataaaggcagacctatcagagtcaacagacactctaaaattcagaaaggcccaaagagacagatgtgctgcagactctaagagaccgtggatgcccagactattatattcagtgaaactttcaatgaccatagatggagaaaacaatatatttcaatcaaatttaaacaatatatatccacaaatccagccctatagaaggtactaaaaggaaaatctcaacccaaggaggttacctacacccatgaaaacatagttaataaataatctcacaccagcaaaacccaaagaagggaaacacacacacacacacacacacacacacacacacacacacacacacactaccaccaccaaaataacaggaattaacaatcattggtttttgatatatcaatggactcaattccccactaaaaagacaagggctaacagaatggatgtgaaaacaggatccatccttctgctgcatacaagaaacacatctaaatatcaaaggtagacattacctcagagtaaaagattttcccaagtgaatggaccaaagaagcaagctagtgtaactatgctaatatctaacaaaatagacttcaaaccaaaataaattaaaagagatgaagaaatcatctcatgctcatcaaaggtagaatccaccaaaatgatgtttcattttttgacattcatgccccaaatgcaaaggcacccacatttgtagaagaaacattactaaagcgtaaactatacatcaaacctcacacagtaacgggagacttcgttaccccactttcaccagtggacagttcatccagacaaaaactaaatgggtggtgggggcggggagtgcagtaatttaactagctgtacattcatccaattatttttttaatctccaagtttgtgtttctccagggtaaccctgaggtcatattaagaccttgtcgcgtggccttagagatgctgatatgtgctgtcactagagttccctggtatatcaaaaaataactaacacaaaagaaaataaaaggagtctcagggggcttgtcagggaaaactgacctctgtgcccaggcatctctgctgccttttccagcagcttcctcttctagacccctgagtcctgtagcttgccacggttagacgtgccttgtacagaaacctctcatctacaccatggtaacttggttgtctcctgacgggggaggtccttctgtgtatgtgtttgtcttattggttgataaataaagcactgttggccaatagggaagcaagttaggcaggactaggagagaaggaggattctgggaaatgtagcaaagaggagagtcaccatgtgatcccaggaagagaggacgcataaggctggagtcctgggtaagataagtccttataaaaacatatagattagtagttatggttgataattaagactgagctaacaaataagaaatcctagtcattagccagcagcatcgtaactaatataagactctgtgtgttatttgggggccctaaagcggaggtagaacccaggcggctggcggaaagagttatcgttacagtctccctgtcccctgcctttctgaaacctggactgttgtagctctcccgtttcactcttgttgcttcactgttataggtcttcagtgtgtgtgttcttacttttccttctcctagagcatactagatacttactatctttgtatatagttttgtatcaagcctgaatctcgttctttagactaaaagggaaattgtagtgagagatccactcaccctcacctgtggcgctgaccatgcctgtttgggcatagtcacaggtgtgtaagggagcgtgtggtatttggtctgaggtccgggacagggtctctctctcttggctccggctgggtcacagagagcagcctggatgtgggtccttggagctgcagcttgcaggtctcctgtttcttatataagtgacttctccctgaataaacttaacctacatttaaccaagtcccgtgtatctaatctgtgcttctacagactgtagaaaaaagtcttaaaaatttcaaccaccctaaatagccccccactatgtgtgtgtgtgttggggtgtgtgaatgtgtgtgtggatcactgagagggggctacgggagaatgttggggtgtcctgctttaccactttctgtcttgttcctctgagacagagttgttcactgaacctagaatgaggctggtgagcaggaagccccagtgaccttcctagctctgcccctcacagtattggctactggtatgcaaaactatggataggttttcactcgggtgctgggatttgaactcagatcctcattcttgcacagcaagcactcttaccaaccaagccatcccccacggccactttttacaatttttatttttatttcattgcgctgttgttttgcctgcatgtatgtctgtgtgagggtattgggtcccctggaactagatttgcagacagctgtgagctgccatgtgggtgctgggaattgaacttgggtcctctgaaagagtagtcagtgctcttaacagctgagccactgccctatcccacagtagtcgcttttaatcttggaagaacataaccctaaccctaaccctaaccctaattcttaagtaattgtgtccccatgactttcattcctgtttaagttaaagggataactgacttacaaatgagtaaaaggcaccaaaattgtaccaaaaaaaaaaaaagctaaaactaaaactaaaatcaacaacaataaaaccccccccaaaaccctatcatctcttcatcaaaccccgcctaagtttcagcttctgaccttggcgtatcctccgtattcttcatttacttgtcagttatttgacttgagtcccatttactgtgggaaaatcttcacaagcattagcaaagccaccgatcccacgcagcttaccgtccccctacactcctgcagtgtctggtaggccatccatctcattaggcaacactagcatgttagtcctgtctttctaagtggtgggcagagctggtcttggcatcgaattgttacctgccttacttagcactctgtccttaaatccaagaagctcattagtatccgaaaacagagatgaggagacgattgccactaactaagggaattcaaccgagatttcattcctaaatacgtgatggggtgggcactatttgccctgatttttctcctatgtgctagaaatttctacagctctgacgctgacataactcttcttagagttgattgtataaaggaacttccacatcttggctctctcctaacattcaggatgggacttctcccccattttctgaacccagtctccttaagaacggtaagtgaccttgtttactaatgggatgaaagcaggggcttcccagatgtgtcgggagaatccattcttcctggtggtcaggctgtcacttctcagtgccggcagtggtccacgatccatccatgtacatcttgtaggatgccagagcagactttctaatgtcgagacctcattattaaagcaccaggatcccctaaaccagggtctgtctaaaggagtccttgtgtgtggaaaggacatgggaaatgaagagggtaaatgctcatgttttgaaccgaggaaggctgcaaaggcgttgtttggtagtggtgagccctgtcagctggccttgatcagtgccatagcttagcagtggatcacacggggagccagcaggacagaagacagctgctggggctcacgtgttttggagtcaacaagaaatgccaagaagttttgctgagtaacagtgagaaactgggtgtggtggctcatgcctacaatctcaatgcttgagagcttgaggcaggaggattgccatgagttcaaggtcactctgagctataaagttttcttgcccagaaaaacagaacaaaaacaaggaaattatgtgtgctgggtgttaggtccttccgtgggtattcggcttcccgtaaaagatggctggaagtgacagagggagttgtaaacttggcactgaagtcccgggaaagggaagtgtgtcgttcaagaatgtagttagaggaagtgtgggcttcgggggacaggaggggacagaaccgtggcttgcaaccatggcttgcaaggtcaaccgttctgttgagtggagagagctgtagctcagctctcccggtggcaggtttgagcgcctgtgaggaagtcagaggctccatggtaaaggacagtgggagctgacactggggttgaaaggggaggggggcgggggagctgaggttagagcacatcccaggtctctgtgtgtgaggccagttgatggatgaggagagggctctagccctagaagagaaaccacgaggctaagaggcaagctggtcagagacaggcctggacactgctgtcttccttctcaggagagggagttaagagcttcgcatgctgggttccaagtagaatgtcagagggaacaggcccaactgcaaaccttcctgccctggatgtggccacactgctaggcccctgtgcctcaggtgctagggaacacaggctctatcgaacagcccagggaaacaagcgctgcctcccgggactctgaggtacaaatgatggcaagattaggaaggacaagagtatgggtcactccatgctctgtttcatagctgtgctgcctcatcaaagccctgattattcaaatcatgcttggcaaatttctgagatcccaaattatccatcgaaagggctctgaagagggtaattagggttgggggggtggctatcgaataatccctcacaagtcaactgtcttctaatgttgtcgatcagttcctttcattgaaacacttttttttttttcaaagtgataattctaaatttttggtggtagatggagaaaggaagaagggctggaggtcaacagtaaaaacaaagaatggggtacagggaagagagggagcgcttttaatgagaatgagtgcttccaaactttcccgtgcacaggaaccacctggccttgttgaaatgaagacactgatccggtggagctggggagggcagagattctgtgtgttcagcaagcaccgggctcatgagcctctgtcacagaccatgcttagagtggtgtgcttcttcccgctggacggagacgtacaagttagctttagaaagtgggctgcctcggaggtcagcaggccgttttcaaacctaggaaagcagagtgggcatcaggttcatgttcacagacatctgtgaagctgtgaaaccaaaagctgaagtctcgcttatatcatatcttagcaatggaactttgggcaaatcgtgggccattgctgactctgaatcccttgatttaaaaagtagaaatggttaggacctgccttgtgtactgcccgcagggtaaagatataatgaaatcatgtaacaaatgtgcccaggtaaccaaagcgcctccagtgtgtaaccaatgctattatcgcttccactgtgctatgtgaagttgaggaaacctcccctttctgtgtgtgtgcacacctgggtgtgcagatgtgtgtttgccacccactctagttctttaaaatcaatcaattaatatttatgcacgtgaccattttccctggtgtgcacgtagaagtcaaaggacaagtaggaatcagttctctccttcaagcgtttgggttctggggatgaactccggtcatcaggctgggcagcaggtgccttcacccgctgagccctcttgatggccgtggtggtttgaaagaaaatggcccacaaagggaggggcactattaggaggcatagttttgttggagtaggtgtggctttggtggaggaagtgtgtcactgtggaggcgggatttgaggtctcatatatgctcaagccacgcccagtaacacttcctgttgcctacaagccaagattttggacactgggctacttcaccagcaccatgtctgcctgcaggccaccatgtttcacaccgtgtgataatggactaaacctctgaactgtgagccaccccaattaaatgttttccttttgtaagagttgcggtggtcatggtgtctcttcacagcgattgaaaccctaactgagacaatggttcccactttattctttttgagactgagtttctcactgatctggaggtctggattcagtaggctgggttgaatggccagcaagacccagagatctgcctgtctctgtgctaacagaaccatctccacatcacctccttacagcttttcacaggtgtttctgtcaccctcctctgcctgtttgttttgtggatcattggttgttttgagacaaggtctcatgctgtagccccagctggcctggaactcactatgtagcctgagctggcctcaaactgatggtcatccccctgtcacagcctcccaagtgttgggagtctggatacaaaccacgggtaccttctttccacttcttctcaggcaccctccccttccatgagattctttgctctccagtgagctcacctggctggaggtaagagctgggctcacacacacagctgccagcttggcagtgtgggaaacaggccacattctccaaggaagaattagctacaggtgaggagacactgctgatcccattgacagccctcctgctattgtccttgcagtgctgaagtaatggctgtcacacctgagatgtccctgcagatgaggacagctgtgaagggacaacaagtgactgggaagaacaatgaccttctccaaagtgtcagtgtggctgaagatgtggagtaagtcagggacctagagacttcctggggccagcaggaggcagataatgagatatttcaagttcagggtcatctaattttaactatcaaccgaagtagccttatgaggcgtccatgctgcctctggccagaatgaggcctcatcaggcagaacgggcaagccttggatttccatttgggaaactggttgtttcatgttcattacttcacggctcccttatccatagctgctaaagatatagccgtttggaatgcatagttacagcaccttggttacataatcgtgcatccatcagtgatggaattgggtccttaaacaggccaaagggcacctcctgttgctgttggtttaagatagtgtctcactgtgcagccctggctgatctggaactccttaagtaggccaggctggccttggattcagagaggtcggcttgcttctgccccccaagtgcagggattaaggataattcgcataagtgtatagatgccatgtgtgtatgtgtgagtatttgttactcttctctcactgacaaagcacagtttatagaaggaggagtttgctgggctcacggttccagaaggtgaatccatggtggtgcagctcaggcagcaggtgatagatgtgccttgaaccaaaagcacaaagcagagagagcaaactggaaatggccagagtattgaactctcaaagctcacctccagcctcatactcctccaacactcctaaatcttccagacagcaccatcaattaggaccatgtagccaaatgtctgagactatggggacatctcattcaacccaccagagcagcctaggtgtgaagtgtccccagcccatttctgggctcagggtccacagacatggaatgacttactaaagacatacattgtaaggtggctgtgattcagtttttaaaaatgagtatatgtgtcacatatatgcagttggtaaaataataacagcttagtaggagatgggcagagggctctaagactgttgtaacacaggagagaagaggactgggctgtgaacatacagacacaggaactccctgtccctgtgctcgcatgtacacacagcacacagacacgggaattgcctgtcactgtgctggcacacacacacacacaccagataaaaattgttatgcttccccaacatagtcacgtatgtggagcaggccttatgtactagtatgacttcagaaagattattacaaagggaattcaaagttcagacttaaagtatataaatatgcccatatttatacagacctatagaagcttgcatgcttggcatgctttctgtggaagaataaagagtaaagaacaaaggacagtgtggatggactaaatatttagagctgtcatggtttaaatgtggcttcttgtgacggtgctgtcttgggggactgtggggcctttgtgaggcccagcgggaggaagtaggccactggagagtgagctttggagatgggagctgggtccttttctctctgggtgatctgtgcttcctggctgctgactggatgagagcaggcatctgatctgtgcttcctggctgctgactggatgagagcaggcatccttaagctacccctccctatgccttcttcaccaccgtgggcggttccctcactgctcagttccaggagctggccatggctatgagaaaggtaacccctgtgtcttagtttcttttccggttgctgcagttaaataacagcgacaataaaagcaatccctgacagaaagggttttttcttggctcacaattcaaggcacagttggtcttgccgggtaaatcaaggcactggaagactgaagcagctggtcccattgcacccctaccacaagagacagagagccgtgaattcacacatctgttcagttccttttctctgtttatataattccagaatcccagccaggggagggtgccgcccgcaatgggagggtctttgcgtcccaacccattgagtcaagatagtgctactcagtcgcgcccacctccgtgtttagactctgatttttgattctgtcatgttgacggtactgtcacatagtacaagaggccaccacagacctggtcctctttgactaatcactctgtagaacctgagtttttgaggctctactctttgctgtttgtttattgtttatctctcccacacttttatatgtgtaaatacgaatagcagcaatttggaatctcattgttaagaaatttatggattcggccaggtgttggtggcgcacgcctttaaacccagcactcaggaggcagaggcaggcggatctctgtgagtgcgggaccagcctggtctacaagagcgagttgcagggcagcctccaaaaccacagagaaaccctgtcttgaaaaaaaatatggattcagccaacaaatatttatgcagttcttctatttctcttttgcaaaagtcagtagagggtagcacgtgtccctggggctgggggttgtctctcaggtctccgttaacagaggaccaacctaaactcctatggtacagtaacacctgtgtttgctttgtgtcctttgcatttgctaagggaaattgtcaaaatggagcaaacctcggacagaccagatgaaaaagatgaatttcctgaaaacccgcagacggattcccttcacaaggtggactctgaagaatgggtaagcaaagctgggcctgatgaagtgtgcttgtaatcccagcctgtggaggggaagatgggagaatcaggaggcgctcaaagtcagccttgggtgtaacggaccccaaacgcaagcagacaaaaagccaaaggaggtagagagacgcaaatatcatagcaggcagagaaataacctcacctgcgcctcaaaggaggaagaaaatgcccagggctttcccttgtaggtggagcactgagactgagaggcgggcctggcactgtttcccacactgctgtctacacccgggggtcttcccagcttcccgacaccccgtctgtgtgtgttctgtgctgtctttgtctgtgaggatcagttacaactggcataggttaccttagagcagatgttacatgtaaaatcatcccctgcttgtagaaaggcttccaacagaatgtgttcatccaacctcgatttcatctccagggggacccccctcctctccctggtggtgccaaccccctatccccctgccccccgcttgccctggctggcgctgcagtttctgtcaccatctccctgcactgttcccactgctatgccttctcctctgtctcacattagggtcttcttgctgggtttgggagctgcccagattatctacgatgatctgattgcaagctcttataactcaacgacaaagtctacacaggcttttgtccaaacaaagcggcatgaaccgtgctgggacatgggcagatgttcttggtgccagctgtcagtctcctgtgttacatgaacttggtcgagccacctgctctcaggctgagagcatttccaacctgcccgagtcccctcaagtctacttgaggatgcagactccgctttctgacgggttagcgctgaggcgtgctcctgtggcctcggctggggtttatgcaggtgtcttggtaaggaacgccctcctgcccaccccatgcttttcagtttaagatttgtcttattgaggcacaggagttttgcttaaaatctccccaaagaactattttacagtagagttaaaaaaaaaaaaacctcacgggtgttctgacataaattattgtcattttttggtaattttttgcatgtatatacagttgaaatgccagagaatgactttaatataaaaaaaaaaagcaaaaagaaaaaaggagagacaggagaaacaagaaggaaggaattttatttactaaatacaatagagtaaggctctttctctcaaaccctaaccctgaaataaataaggagagaacacagaagcacaatgaccagccatgctcctccagccacaccttaaaacagtcaacagccacggcattcactttatctctgcatgtataaatagctgcaatttgctgagccatttaaaagtaggacaaacacaacagtttgtccctgttgccttcagaaagcctctctaaaaataaagattgtttcctacgtatccaaaatactgtcatcacatctagagaaattagcagtttagcacataaaggagtctaagcttctcatctcagtattccagttttcctcaactatgcctcaaatgtttttagagctagtcatttttaaagattcatttgtgtaatttttttgtcttgtttttcgagacagggtttctctatagctttggaggctgtcctggaactcgctctgtagaccagggtggccttgaactcacagagatccacctcctctgcctccttctatgccatgcgcttagttttcacagctcagtatattgtcttactatgagacttgtactttgcttttttgtgaattgaggccccaccatttgttttgttgtgttgtggtcttgttatgtagcccaggctggcccagaactcattgtgtgccctaggctggtccagaactcactgtgtaagccagacgggcctcatactcatggaagtgtgtcctaccccactgtgggtcctggaggtacagatgtgcaccctggtctgtctggtgttgagtttttgaagagaccagaagagccgagtgtcctttgactcaagttttggagttcatggttggctgcatttctcctgttcacccagtccttcctgggaggctagtactggaaagcctgcccccaatctgctgcaagccaaacagaggccttgtttccttccctcatccacgcactagaaggccgggcctcagacaggctgtgtcaggtagggctggaggagccaggatctctctcaattacccatttgttccaccatcgttttatgcaggacaggttggagcaggactctaagcacagccaggacccaccgatcaatcaggatgagcaagaagcaactcttgtttgtgcagaccctcgagtgtcactgtcacagttttcagagacgagcacccttgcaccgtaagctctgacatgaccccatggagagcactgggtaatatggggtagacgagcaagcttagtaaggaattcagagaaatcctgttgaaccacacagcatccacgtgtgtggggactggctgaccctgcccagcaaggctgaagagttaggcagccctggcctgaagatgctgacacagccatcaggtcttctgagtatccttggatttggagcttagaactgacaggcatctcaaaaagtctcagataactgcttatatatgaaattcaccctgatcattactaaaagcctgccattaagcccttgagtgctgcctcctgttgtacgcctctcctcccctggccgctatcctgacccaatagctaacattcattacatagagggagatttcaaatatatctgtttttagggctggggcaatagatcagtgatagggtacttgcttagcatgtgtgaggccctggggtcaacccctagcgttgagaaaaatataaatcactcttttaaaaaatagaaacgtttcagaaaaagtatgtgtgtgaatgttttgcctgtgtcatgtatgtatgtacactgcacacgtgcctgagcctggggagctcagaagaaggttcggatcctccacacctggagtttcggatggtttatgaaccaccatacggtgcttcgagtcaaacctagcttctgtgcaagagcaaggagtgcttgcaaccaattgagccaattctccagccccacataacactttcaaaggctgggcatggagctcccaggtagagtgcttgctttgcgcaaggcccggagttggactctcagaaacacgcatgcctattttgcaacattatttgctttacccaggcttttaaagacctgggtttacacagatacataaaataaatggccaccgtggcccatctccatggcaggaaacacatgtagagatcaacttnnnnnnnnnnnnnnnnnnnnnnnngctgtgtgagatgtttgcattgatcgggaccctgtttcctcaggccccccgagggctcggccctcaagctgagatactgggatgcaaagatgggtctacaaatgaaggaacttggagccgaccacgacaactggttggagaggatcaacaacattatacaaaggataaacaacacagagagtacagtgaagaggtaaaggctggatattgggacgggaaggaaagtggtgggatgtctcatggcttcgaggctcacaaaaccatctctcattcatcagtgtggcctcaagacaagaagcgcagcccagggttgcaagtccacatcccaggctcacatcccaggctcacatcccaggctcacatcccaggtctctcagtctctcagtggtttctcccacacactttttatttaaaactgagttatttatcaaaggggtgcacacagcatgctctcatttttacctatgtgtgtacgtgcatgtgggcacacacatgtatatatacgtatgtgtgtacatgcatgcaagcacagatgtccaggggatcagaggtatcagatcccggagcttgagttacaggcgtctgtgagccgccatgtggatgctgagaaaccaagttgtccttctgcagaaacagcatgtccttaactgctgagccatctttcccatgccaccccgaagggtctcttgttgcccaggctaacctcaaattctctgtgtatctgagcataattatgaactcctaataacccctgcctctacttacttccccattatggaatgtgctaccacagcctgtattctgctgggatttgaacccaggtcttgaagaatgctaggcaagcaccccattaactgagctacacctgccttagagagcctgagtcctgaaggcccacttgttgggcgaattaatcgacctttttaagggcttgcctttcctcatgtataaaaagttactaatggtgccctcatcactggctccattgagagggttcaagtgtgaggctggtacacagccactggttaacaaacagaagctcttattgggaatgagtgtctgaatgaagccttgaatttccagaccatgttccaacctctttcctagaacaagggtacggagctcctagctgtttcctctttactgtcgcaaagctgtctgtccattcacaccccatccaggtgggccttactgtcctccaaagcgttaaaagggaacccaagtcccacacactatgtattttctcttttaaagtataattatattacacgacaattatgttttttataatgtgaggtcctgtgagtttcacaaaagcttatagttataatactgacatgatgggggaagtacttctgtgtatgtttatcttattgattgtttaataaagttctgtttggccaatgaaacagcaggttagacaggactaggagtcaaagagaagtggtgatccaggcaggaagtgacatagcaaggggactcatatttcaagaaggagaaacaggaagcatccccttatccccctctgcacctcctccagcggcgggatgtgagccaccagcaaggagggacgccaataaggcttccgataagataagtcttataaaatacatagatttatgataattaagactgagctagcagatgggaatcctagtcattggccaagcagctttgtacctaatatgtctctgtattattttgtccatccacgcggcgggcagaacttggacagctggcggagaccacccatgtggtggtagggctcgggcggctttggcggaaagattgatcgtaacagaatggtgtcagagatcgggatgaccccatgccccaaggttcccagagaaagaggaaacctgcggccacagcctgccatgtcaggccgcataccttgacccatcacaaaatccattattctcttctttccttgcatttgttttaagactgtgtcttatatagcccaggctagcctgacacgcttgatcccccttgcctccatctcttgagtagggtttggtgtgtaccaccaagcccaacttgctactgagttgaagattcttgatacagtctggataaaaacccagattcccagtatttggatttttgaaacgtcactgtccgggctgtggccacagcgcagtgcctctcctgcacgagtccctaggtccagtcccttgcaccttcccttcccacacttttaacagcacctctcaaggagctgaggcgcgtctccttactgtgcccttctatgtagagtaacaacaatgtttcacttttgaaagacgggacacctctcccatgtcggatgactgttttctcaatccataggacttagtccatttcttcatctgtttgtagcctgttgactgaggtgatatccctggaaaaccagtctgaaagtttggaggaccctgacgaggaagcaaacattgaggtaagccgggttccgacttctgcctccacctccctcctcgggtgccaaacagatcttagccagagggagatgcacctccatcacaggggagctctggccactctgctaagccccttcctccaggggatactgcttcccttgttagacactaggaatcctggactctgccttgtattcctcctcgtaggcggctggctgtcttgacaccctcgtgaggatacctgcctgtctgactctcagaatcccagccctgctagttcagaggaaacatgtaggaaatgggaatctattaaccgtgtcctgagaaattaaggactaagctgactgtgcggcctctgatgccctcttgacatgttcttgtgttatttccaaacctccaaagtctcttatttctttatctctacgtgttcttagagattcttttcagagaaaaggttatttttttaattttttgatgtttgtttttaatttttattgtatttgtgcattgtatgtttgtgtatgtgtgtgcatgatatgtgtacacatgcgtgtatataatcatgcatgtgtgcatgtgtgagtgtggatgtgcatacgtggaggtcaatgacaacttgccaggttttctctttctaccttgtggggcccagggctgtaagtaggttggtggcaaatgctcttagctcctaagccatctcgtttggtctgattttaagatgtttttgttttgctttgaggcgaggatcttcttttaaacatgggttagtctggcgctcattatgtagactattgtgtaggtggagttttcctgtcctgacttctgcctccaaaataaacacacagagactcaatattaattataagtgcttggctgatagctcaggcttgttgctagctcactcgtccattttaaattaacccatttctattcatctaccatcccccacatggcgttacctctcttgcaactggcacctcctgtctggctctttcctctccatgtctggctggcaacttctcggactgtgcccttcttcttcccagtctccttagtctggttctctcgcctaacctaatcctgtccagctattggccagtcagcttctttattgaaccaatctcagggacatgcacagtgtaaaggcacactccacactaaccttgttagtttgtgctgacctggagctctcagcaagacagctgctccccagtgctgtgttgacagtggtgagtcaccacacccagggagatttgtaatttaagggggtgggggacttgagatcattggaaaggagaaggcgtggcacacatgtatgaaactgtgctggatctacgcattctgtgtgcccgctgagagcgaagcataccaaatgccacacatgagcgtaagtcccagaagccggtcaaatgcccaccggtcgatagacagataagataagccatatcttgtgggcacaagggaatgccatcctgaaataaaaaggaacaaactcttgactctcccaacagcatgagtgaactaagacacagcaggctctttgaaagacaccagctcagattgttacagactttacggtccatttatgtaacaaaaaggcaaaaccatggggacaggagatagacaggcagttgctggagctgaagggggaagggagggagcagttaagaaatgaccctgtaagtctgctgtcccagcacctgggagacagaagcagaggatcgggagttcaagctcacccccctgatagttcaactccttattaaaccacgtcactcaggggctggtaatgaactaaagcagtacaatacaagggtgaatctgtatcccaaatgtgaccacgtgctgctgaaggttgctggctgctcagggtggccagtgctgctgttacttatactggaccagcccaatgcctagctcaggggtcacctgtataggatgtggccaatcacaccttttaaaaaaagttttgtgtgtatatgtctgcctgtctgtctgtgtgttccatgcatgcagtgctcacagaggccctcagagggcaaggggtctcccggaacagcagtcacaggcagttgtgagccaccatgtaggtgccgggaatcaagagcagccagtgttttaaccactgggccatcactcttcaccgccacttgtatcttagaggcgtgattcgacgctgtcttttataaaccagcctttatgaggggaaacagctgtgaaatctggttttctgaccatgtgtttctcctgaaaactttcctccttcaattccatatgtcattccttctaacttgtgttgttcatccttgtgttataggagaagatcacagaaatccgaaagcaattaaaagaaatgaacataaaattggcccaggtaatgagacgcttttttagaccaggaggcacacagaggcaggcagatctctgtgagctccaggccacccaccctggtctacagagtgagtttcaggacagccagggctatgtaaagaggccttgtctcaaacaaacaaacaaagaagaactgcggtccttcaaagataagcaccatgagcacatgtgtgtttatcttcttctgacatcacatttatttacacaccgagtactgttgccacgagatacatgcttgtgtgtgtgtttatattctgacatcacatttatttacacaccgagtactgttgccacgagatacatgcttgtgtgtgtgtttatattctgacatcacatttatttacacaccgagtactgttgccacgagatacatgcttgtgtgtgtgtttatattctgacatcacatttatttacacaccgagtactgttgccacgagatacatgcttgtgtgtgtgtttatattctgacatcacatttatttacacaccgagtactgtcgccaccagatacacacttgtgtgtgagtgtgtgtttatcttctgacatcacacttatttacacactgagtactgtcatcaccagaaacacacttgtgtgtgagtgtatgtttatattctgacatcacatttatttacacaccgagtactgtcatcaccagaaacacacttgtgtgtgagtgtatgtttatattctgacatcacatttatttacacaccgagtactgtcatcaccagaaacacacttgtgtgtgagtgtatgtttatattctgacatcacatttatttacacaccgagtactgtcatcaccagatgcacacttgtgtgtgtgtttatcttcttctgacatcacctttatttgcacactgatcactgtcatcctcagatgacatcacacttgtctgcggctagcttttcacaggtcacttttcttcaggattctctgtgccagtgagatgtcatcttccttcactgctgtacaacctgagtctgatgtttgagtttatgggctttattttcttggactgttgggattttgaacatgagtgtaacccaataaataaaaggcccagaggctgatattggggttcaagtagctgaagatcaaaaaagcaaagcagccaagccactagctctcacctctagctcagactgaaaggagatcctggctccaccaaacctcagactacaatcccagaccactatgctctcctcagcgtggctggagaatcctgatactgaccaccgaagaccctgctgggattaaaggcatgagctctgttattcttttagactgattcagtctcgtgtagccctgggtggccttgatctcagagagatccatctgcctttgtctgagtcctgggattaaaggtgtgtgccaccactgcctgatctctgtagcttgaggctgactttgctttctgaatcttcaggcaagcttcaataaatcataaatatcaccacacatgagtgtttaccatgagaaactgagcctcaagaaaccaatcctggggctagaacactggggctcagtgacaggcacagatagggcccagcgttcaatcatctgctcctcgtaaaccaggcctggtggcacaaatgtgtgtgtaatcccagtgtttggaaggcaaaggcaagaagatttggattcaagttcatgcttggctgcacagcaaattggaggccagcctggaatatgtgagactctgtctgaaaaaattaagaaagaacagacgaaaaacctccacctgctcctgtgagcattcctttaagaatcaagacaagactacgcattctcttccagatgacctgagagggggtctctcggcaagtcaactcctgacaggcagttgctggagctgaagggggaagggagggagcagttaagaaatgaccctgtaagtctgctgtcccagcacctgggagacatacgttcttattttctcagaagcctgctctttcaccagcttctaccttggtgcaagatttttgtttttaatattaagtatggatgcttttggcagcatgtatgtctgtgtaccgcacacatgcagtgaccatggaggccagaagaggacgttgggtttcctggaactggagttacagacggttgtgagccgccatgtgggtgctgagaactgaacacgggtcctctggaagagcagccagtgcccttacttgctgagctgtctctccagcattagaagatttttaaaaattatttattcttgttttatgtacattggtgctttgcctacacgtatgtctgtgtgagggtgtcagatcttaagagttacagatagttgtgagccgccatgtgggtgctgggaattgaacctaggtcctctggaagagcagccagtgcttttaacctctaagccatctctccagcccatagaagatttttaaggggcatcaaaggtgtaacaaacagaaagaatggcttattagaggctgttgtataaacttacacgtgtgtgtgtgtgtgtgtgtgtgtgtgtgtgtgtgtgtacgctgtgcatgagtgtgtgcatacatgtttgcatggacacaggtgtgtgtgctggtgccagtgtgtttatgcatgtacttgaggtctgaagtaggtatcaggcatttttctcaattgttctccgctttattttgaggcagggtctctcgctgatccagaatgctctagttctggccagtctagctaaccagtctgctctgagatgctcctgtgtctgcctctcaggccgcccccaggcctgtccagctcccacgagggttcctcacacttgcaaggcagatgcttcatcaactgagccaacttctcaccccaaagttatgtattcatttatttttgtttttgctttttttttgaaacagtctcactacctagccatggctggccttgaacttaccgagatttgcctgcctctgcctctgtgtgctgggattaaaggcgggcgccaccatgctggggaatttatacttacaaaggactaaaaacaacccacactgaccttggctattcttcttacaatatacagttcacaccctggtcagtgcgtgggctgtttgcctcatgtttgttccaccaccattttcattcattggcttttgtggtgttgagcacggagcacagggccctgtctgtggtagacaagcactctgccgcagtgcttgttccctcagacccagggaactatgtcactgagtaaacgtcgctgtctcagaacagccactctgcacatggtacaaaagcgagaggttttaacatataaaccagaaagacgcccttgtcagtgtactcagacccgttgacatctttctaggtcgatgcctgcaacgaagcccgtgaattaaaggagaaactcattgaacggatagaggtgagatgccccaagtctacctctccaagcaggtcagtcgggctcctgctaagcctggcggctatttcccaggaagccaacctacacctcattctggtctctggctggtcacaggtcttcttttccatccctcaggcttctttctgccttgggccgaaagaagcctgacggtttctggagtctctctctacgcctctgcttctcctctcttagtcacccggagctttcctccgtgtccatgtgctctgcattgcacaaggctcagtgcaaatgacacctcttccccagacctcccctgtctctctcatccagagaatgagttcatctttgagttccttccccgacaccttagacgtggggggaagcatgacatgtggctgaaacagtggacagatgggctactaccgtcctactcagaggtgctggctcctcagcgtcactgggtacttggtccacaccccaccaagctcggccccactccttagcgtgcctctcgctctcatgcatgtggacggttggctgtgtgttacttgttgcacagccttacacgagcacctgtagttggcagtggattcctatctattctgtgacctggaggagggcctggtgggcatcactctgtatgtgtggcgtgggtggccacactgagacagattcagtacaggggtgtcgtttcaatagttaaaggtttctcctgtcttcccccactctgcatgggtccactgactctgcccttgccattggccacctgagttgtcacagagggataaacatcctcctttgcctacaatgcaacaatgagaattttttaaatttttttaaatttattttaaagatttgatttatttattatgtatacagtcttctgcctgcatgccagcagagggca

SEQ ID NO: 4 - DNA, 126887 bp, synthetic construct
  source 1..126887: mol_type = other DNA; note = ERE67000.1 Contig Sequence
  misc_difference 1..126887: note = N can be a,g,c,t
ccaaactactaagtccaaggctcaacagggaactaatgaggaatgactatagagagatgacctctgccatgacactcagaaggtgggagcactctagaaagatgttccaggtgcaggaaaatggatatttattttcatgctgcaatcagctgtgttgatatttttctcaatctagtaaaacatgaaacattagaggacctgtgctctatctaggcacagcacagactggaccaagacatatcatttctctgtgtgtcagtttatttacatatgaaaaggtatttctaaagtcacttttcacacttgcctctattgtcctttacacacagatacacaagacagtctccacaaaccagactactaagaaaatataagaaagtagttataaatgagcctaaattttctgactctggatataaatgcctattcccatctactccatctaaaccgtgaaaaactcttgaaatgtgttttgaaggcaaacctttatgtagtgtgtaatgtcaaatgtctgggttggacttcaaattcctgtgtggcacggagtgggagaagaggtaatatgcagttagttaatagtaacatgatcaaagtaaaaagaaacagtccctacagtcatttgtagggactgtagggcagttttatctgataagaaccagagcttaaacaataaattcacaatggtttacatggtttttcattcccaaactgttcagcatattgtgaaagtgctctaatattcactttttcatgaatgttaagatctgtggactctggacttcccttctccaccccatccatacacattaaaaactaaaaggtctgtggctactgggactgaagcaggtattgcacttgatgtggctggccattctctgagcaggcacagttgctgctgatgtttcccttacagtggaacaaggattagaaatctagttctcttttgagtactaaatatcaaaattccacaccaaaagtgtagcaataacactaactagtaaatttcaaaaaaacaaaacaagaatccacatctgaattgattcaaatgtgtgtgtgtgtgtgtgtgtgtgtgtgtgtgtctgtgtgtgtctgtgtgtctgtgtgtctgtgtgtctgtgtgtctgtgtgtgtgtagaagactcctaaggcccttatacatgtactcacatcaccacagcagacttgtcctcaagtggcttttcttgggaatagaataaactaggaataattagggacaaagtcagcttccatggacctgatcctttggcatttccaggaaacttaatgctgtctaaaatgaagccaaaaacttttggctagaccccacacagtacaaaaaaaaaaaaaagtggtgtaaatccctactgcctcgaaccccacaatgacgactaacagtttttttataattgacaagattttcagcatagtgtgttggaaagttgtttgtcaagattttggtctcttcataagtaattgggaattctgccagacaacagactacagtcattattgctgaaattcagatagaaatgtgaagatatatttattcaatagtcagtaccaaatagcaactactacaaacagtacaattaatactattaattttcatactatcaattataaatttcgatcaactaaagttaagttagcccaaataaagaaagtacatggtggtttccttaagaaagctatggctcaaagggttttgcaatgaaagtatcttggcaacccgggccaaggaataccacaaaattaacagcatgcaacagacttcatgtaagagatttattatgggattggggggggatacaaaatggctgcctctgagccaggatggagacagaaacaggctaggctgtgatggttggattatatggagtacagagcattcgaatagggaaaatttggtgatggaaaaatgtctcattggcccatagtaatagtggttgctgtcactgagtcattgaaggcaggcaggaacctggttccagaatgtgggtgaaggacttttggtgattatcagtatgcccagcaatagcaaatttgaaaatgtcaataaacccaaagagaaataatccaaataatgaaggatattattgtattattcagtactatgtccaatttttaaataattaattataacacattattatcatcaacctctttttttgtctttttcttttcttgtcttccttttttgtttgttagttttttgttttgttttgttttcccagacagagtctcactatatagctctggctgtcctggaactcactgtgtagagcaggatggccaagaactcagacatccaccttgcttctccagggattaaaggtgtgtgccactatgcctggtttgtcattccctctcttgcttcaacagtttgcttctgttaaaaccaaaaggtgacaaatgctgtcttcccatgctgtccttaagaactaacagcttatctctagcaagattttcttctggttcacagctctttgttgtgtttcttccacatttatgttacctactggtttgtattacaaattcctcccgataccatgacagactgttggaagacattgctggctggtcagaggtctctgtctccccatggccaggcagcttatctcaatagctcagcagcttggagctccctccctccagcaagcttcctgctctctacctggccttatctggagaatatccctggacctggaggaggactgacctaatctctaaaaccagatgcctgattcatccttagcttgacctttggcacaaatccctgctgagaagtccctgctagggctgtgagatgggatcctactgccacatactaaacttgataggggcatggtggcacttaatgcaaattagggcttgtctccaggctccccatccctttatatttctcaagatctgtctcctggaaggctgtttcctatgggatgccaaagcttttttcatcccatctgcctctttcccctcctagtcagttggccaactggcccgggggaaagaggaccccaacaacagtccatctattacacacaggatataatacatcactgctttgtgaattcagttccctatataattctcatagaccacaaataagcttcttcccttcatcttgaatatgaagactatggtcagaaatggagtttccaaatagatcagcaattacttcaagaggctgatggctgaagcattatttataatttataacacatcaaatgtttaatactgtctcctgacaaaaatctcaaaatgaattctttatgataatgaggtatgtttgatcctaaattaatgtgggtattaatgtgggtagtagttactaaagatatgaagaatgtgtttttaccaatttcaaaagagggaaattacacacatactagaggccaaaaattatttgccaatactagaatatctgattttcaaaacaaaacataataactataatcatatcctctttttacttactcaaaacatttttcatctctaacaggaggacagataacttcaatatacacttcacattgctgtatatcctcttaacttagaaaatccctgatctttccccacaattcctttgtctactaagttgtgtttatgaaaacaaaaatctaagatgtatattaaatctctaagaactagtaaatcacaccacagagaaaatttggtttggatgagtagataagcaattttaataaatagtccaattcagaggaagaatttgagcaagataccccagtctaatgtatgaaatcggcatttgtctttctcatatacttaactctacttctgccccatatgaaaaagcttaatagtgtcaagtaaattaattgaaaagcttagccatcgttgtgatccatttctgcagatgaatttactagaaatcgtgtacctgaagagggaaaaataatttagatttatgttgaaccccaaggagagaatgagattgtgtgtgtgtgtgtgtgtgtgtgtgtgtgccacacacgcgtggcaggcatgcaccttcacataaatgatgtatgtgtgtgtgttgggaaagctattttaaaactcatttgctcaacagataaaatacaatataatgtttcattttattgtgactctgttgagtgaagcaaagaatgacagaagctccccactggaggttacaacaacctaaggaaggttgaatgaaaatatgtaatgatgattgataccagtgctcactgttatggcttcttatcctatgaaacttccacttgaaaatttcattcataacaaaattcaaagactaatgccatttaaatttataagagtcctcaggagattactataattgccaaaatacaatgaaagcaattcacaaaagaagtagattaattccacacatgcatttcaatgtgagaatcctaaataaaggatagacttcagtgtacattaaaacaatatcattaaacatattacagtgttaatgaatttattgtgctactactattcaaataatatactaagaattcaagggtggcttaatatttaaaaagtattcatagaattcacattagaagaaaaactataggttaataaaaaacctggaaaataatatattaaaattctatagtcacaactaattttttttgaaaagcaacaatgattcaaatgtatgagcttccttgaggtaacagataaacttagtgaaagcacatttgatatctgtttcattgaacttcaggaaaaaataactgtagctttcaacatgtaaaaagcatgattacttagtaatgataaactattcttgaataggtttatgtactttgactaacagttggtatgtatatacttaaacagttccatactccctgaaatatttacaccaagctgtgatacaataaaccaaattgaatgctgaaataagaaataaaaaacattattaacttaaataaacattccttaaaagatagtgggagtgaatcataatttaaatacatttttgagaatttcatatatgagtactgcatttatataattttacctctctctttccaagctctaattcctcctatgtgcccaatgctcatgttcacggcttattttgtaattatcattgttaaaaacatatatcctactgaatccattttgtattgtttgtatatgtaggtgcccagaactgaccacttgcaattagacaacttatgttggagttcatccctggaggaagctgattcttcttctctgagcagtttttgactgccttggctttacatctagggttgggggccttgtgagatttcccctaattgtgtttgcttgtgaagtggtgctatctttgtaagtgttgtttagtcaaccttattgttgagatttcataggtagtttccctatcatatctagaagatgcaatgtcactgcaggtgttcttctcctctggctcttacagtcattctgccccacccctattccataatgttctcttagcctgggtgtaggctttgtagatgtatcagtgggaattgggtaccccatggtcacttatcctttgtattttgaccagatttggatctctacagtagtttccatcagttgcaaaacaagcttctttgaagagaagaatcttcactcttttattccagatacagaaacaatatggtgctagggctttctacatgctaggcaagcacttcagcaatggagcacaggagaaggctttgataagcaagtagtaaaatatagatgatagttaagtacacattgttaagttgcatatatatgaattttaatttctttacagcaattaattgttgggagccaaagatctcaggacttggcttgagatcctaggccatagttgtatattaacctttacatagcagctccttagaaccttagctcaagaaaataaacaacttgacctagtcctccacccacaggctcagtcacctaggcaacccttcctggactgcttactcataaactctttaaacatcctctctttgtggtttcctaatatcctgcttatgctaacacctggtgcacaaacaacccattctacccctccccatatcctgctctactgactatataagctaacctgagaaaaataaagtttgccacttgatcagaatctgttgttctttctgtgtctcttgtccccattccctatccctgactctcttgcctcaggttgatgtcctgcaggtcgggacaattaatatgttaaacaaagccaaggcacaaaaaattagaaggacattttaaaacacccaacaatggacaattgactttaacacaggattatttcttaaaaactggtgatgaaaaaaacaacaaacccatagaaatgtttgtaaaatacatgaacaaataattaatgaaaaagaaaaagaaaaacctagcaaacatgtagctaaggatggtcaaaattaaattcaaagttcagtcaaggtgaaattcatagtagatttgacacctgtgggatttattcctcagctcaccaattttcaccctctctttctgggtggaccctcacaacatctaggacttcaactaatactcccatgtcaactgaatattcatcccagacagcctcctagctctcagaccatgactctccctctgtcctgatactctagcattctatcaacttcatatctcttcaaaccagtgttttgtaaatagaaaacaacagacttttttggttgtgaaatcaattaacaaggtatgaattactttttaatataaaatattactaagtaacaaagccagtctgtaaagatgatggatcatattatgctggatgtatgatctggaaaggctgaaactgtgtatacattaaaaaggtagccaagggtttggatagaggaaggaacaagtaggtataacataaactttgtggggcaatgcaacttttctgcctgttgatatgaaagtagacacatgtaattatacgtattttaaaacctacagaatacacactgtaatgtatttgatagaagacagtatactattggttgttagtagtcctcctcaaatatattcgttgaaaccagaagccgcagtgtccctgaatgtgacttcattcaaagacagcacttccaaagaggcacttatctaactactcagtactagtgaagtcatgcttattggaggggaatctacaattagtttgctaagccagcataatctttaaccaccatctataaacatttgtatagtcttcacccctcatcaaggaaacttctctttgcaacagacagaaaccacaacagaaaaacacaaccaatcccaatgtagagttgtggagatcaatctcaatgaatttgttgcacctaagactcaggggacattgcggtagagggaaagattttaagagccatcggatcagggagtatactatgagactgtgcctctctctaatgtcagaagtttcacccagaaattctcaacagcatgattgcccaaaagtgagctgaacaaatttgacaccatgctgactgaacagaaaaaatccgacaaggcctcaaccctacacaaagcactataggcaactgtggaaagctgcaagtggaatgataaaggtggtattcccgatggaagagcacatcatttggttctttggtgccaaatggtctgccctgaaagcatacatacaagtaaaattatatggactgagtaggttataattaggaatatatagctaaatgaagcactcaggataaagtagactcatatgggtaaatgataacctggtattatttacaagagaagactgggcatatgaaaaaacacagggaaagaccatgagaagaactaggaaaatgacaaccattatcccaaggggagatgctctaataacataattttattctccattaacaatgtcttcattcagacctttgtcgtatattgtggaattatctccaatgctccacacatgatctcatttatctcttgattcaacagatatatatttaggaatcaccatgtgcaggtactttccatgacatctctatgagtttaaacaatacagaaacagtccctgttgttattcattcattgtctaatgccaccactgccattcatggactctctgttcatttactacaatcctgggaagaatccagataaagcatatatgagcactcaaatctgttcagtgagtatctgctacatcctttcatagctctagacactgatccttacaggggcaacaagagaataaaaaaaaatatgggcacacaggtagatagcctgggatcagagagaatttcataatgtttgttttatacagttgaacaagaagtgagtgttattccatacagctgaagcaaggaggcagctgttatggtatacagctaaacaaggagacaggtttagataatcttgggaaaaatggtctctgtaggaaagtaatcttcaggacatgaatatccaagagtgaaaaatgccatgcgtattccttcacacactttcaacattcacatttggacaaagagggaaggctttaactattaccatggggctgaggcactggggtccttgacctggttgtggctatatcaatagcatacatttactcggggcttcattaattcaaggcttcttcagctccccacaaatacacatcagtgacttgccaatgaaatgtgtaatggtgtgaactttctcaactcacaaaagagtttagattatatagtacctgtttgctttctgaacttacctgtaccttactttctaaacaattaatattgaatgatatatattacaccttccttatatgatgttcacacctttgttcctttctatgacattagctatcttcttcctttgcctttgcccattgacaactgttagacatactttaaaacccaatccaactgcagtttgccatccccctgaatccctgcttcctactttaaactcatcaacttcaaaatgctttctgtcacccgggtctaaaataacagcctgaccatatctcattatttacctattaattttactatttttgtgacattacagaggatgatcatttagttgcatttctactatttttcatgttagcatctttcttggatgaatacacatctatttacttggaaatccttgaaatcattaaaattggtcatcaaaactttttgaaaaatgaacataatataatgaaaatctgcttgattaatggcatgaaggaagagatgaaaacccagggcataatgtagagatactgttataataattatatttaatatatttatggactagaacataggtgagtcatgaaagatgatcccagacatacagggaagtaccacaccataaagccatctgtgagtgggttggctttgcaatttttttttgtaaaactcacagtttttttttttttgtaaaattcaatattctaatgattatgtgagtgactcagtttaattttcagatcccccaaaacactgatagaccattttctttaggagagttttcccaattgcctgaacatcctctaattgtttaaatacagcaattaatgagtaatataagtaatgaagaaaaataaatctgacttggaaaaagagcatatatacatcatatattgcaatgtgacattaacaataaagtgcaatatacctatgcaaggttttgattattttccaaataaggttttctgtgtctacatgctgttctctaaagactgtaccctgaatatcatcaaaatggaagactagaagtgttagggtcaagttttgataaaagagccatcacatgttttaaatctgtgctttacacctctatactcacatctttaaaccagtgctgatcttacattaactaaataatgcaaggaaaataagggagaaagaaaaggatgatatcaaagaaagggatttttataaaggatgtaaatgatgaataggttaggccagttgcctctttttggtgcctatacaatttctgctttccatcatttgttattccttaaggaatcagaatgtcttcagaatagagtatgtcatgataagtattggtagataagatgacaggtaaatagataggtggaaagacagaagatagatgattaaatagattatactggtggtgatggtgatagataaatgtgtaatggatagaagacagacacacaggcaaatagatgatagatagatagatagatagatagatagatagatagacggatagaagacagacacacaggcaaatagatgattgatagatagatagatagatagatagatgatagatagatagatagatagatagatagatagatagatagatagatagatagcagatgtacatatacatatatgacccacccatgtaatgtgtttatcagaggatttctgcatgaattagcagaagatgtgctattttggtcttcctgaaaaactaatattaggtattatctaatataatctcttgggaaataaataactgcattttaattttccatttatattttatgtgtatactgttttgattgcatacatgtcatacctattttccacaaatattagaagagtgatcagatcacccagacctggaattatggatggttgtgaggcatcatgtgggcgttggcaatagaatccaagttcactaaaagaacaagtgctgttaactgctgagccatctctccagtccctgagataaacaggtttttgtgcaccacacacaaaattctgtgtgagtatttttcagtggtgatgagtttaaagtccatctcattatctgtgtttttttttataatttgaatgcaaatctatatattctataacctaaatagttgaccaaaatttcattgaataagtataatctccagtaagaggcatagacaaaattgagtcatgcaaatgtttgaaatagtggtcctccacctgttacaataaatctttccgccataagctgcggagccccactgccacgtgtaagcttttcgctagccgcctgcccgagttagggcccaaattaatacacagaaacttgtattaagttcaaagctgcttggcccatgactagaattctcatctgctagctcagtcttaattatcataaatatatatattttataagacttatctcattggacaccttattggcatccctccttgccagtggctcacatcccgctgctggaggaggtgaaggggaaaggggatacttcctgtttctccttgcttatgagtctccttgctatgtcaattccagcctggatcaccacttctctactacatttcccagaatcctctttgactcctcgtcccgtctaacttgctgtctcattggtcaaacagtattttattcaataatcagtaagaagaacatacacagtacattccccatcatctcctcttttctgtctaaataaaaagtataacttatcttttataataactgaagaaaactataaccataactatctgtctttaattctatcaaagatcacagaaggataatatataaactctagaattgacaggacatctcactacctggacagtcacccaaagttcctctgtaacgttgggacatccatcttcagcccataggccacattgtgtctggcacacttctccatttcaacaggaaccctttagtactgtcttgttttgtaagttcagcagtcactttcttgtgggttctgcatgtccagtttatatatgtccagtttatacagcaacaaacagtccaggcaagagaagtttcttgcccaaatggctaatcttgccatgttgaaagcaaactccataacgagtttcttcaatgcccgccctcctttctgatgtaattggtgtgccaggcgcagttgtgtctcactgccaagaaaaatcctaaaccatttaaatgccatatttctgtcttccaccaccagcattctcttcctgatgaaatgacccctcctctctcataatgcagtatctagattatttcatctgttctgaatattctcatctggactgatgcctatcatctttatcactaccaaactgatacggatacagtcacatgtgtctgatactgaaggagactaagacctttatgtgttctggatttgttagaagctaaagattgtgtcagatatcttatcaaccttatgacattatgagcccatattgagtttgcatcaaataaagccccgacgattgctttccatataactatcattaatctcaaactcataaactaggggatttaaaattttaaaaggctaattaattatgaggattctttccaacttgctagaaatcttcaagtctgcctttattagccgaaatatcatctatagaatatacttctgtgtgtatatttcataatcatttacgcatatgaaaatcaatcctctgtaacttgttttgagtcaccagtgagaaattgaccaagagctcagtcacaggattgacttctagtaggggaatttcttgataatattgattcaccagttaacacactgtagatgtagttgcttcacaatctacaatataacttaatggcaagattattcagtccagatattttcttgctttccattaataaacagcaaatgcttataagatgtttcactgaaatttatttgtcataaatttcatacagtcctctgaagcaatattccttgacgagtagggggggaaatctggttaatttgtcacaattggtttcagcactatatggtttatttactgtccctaaaatcaacaataaatactagtctggattcgggaattaaatcagaactctcagaggtctctgaagtcatacttattcataaaatacttatattcttttactcattattttagtgtgatcattaattttataagccaatgtgactgggctaaaaaaatgtccagatagctggtaaaacattatctctgaaggggtttctgggaaagaataatattaaatcagtaggttatataaagaaaatctcatttaaattctctgccaaccagtgaggctaggatctctctttatatacttccagaaaattctccgccattttccataactctaccttttaaaagtggattgtttcacgatgttctaaacataacaccgtgttctttgaaggtttatattgctcactgcaaagctgcattcctaaatgtctgttcattaaatctcagtgatacatggtagtttatgcttactgctaaaattaaatcttcaagtttattttgtttgtcactggccaactgagaccagaattttcagccctgattatctcccttattattggcacatcctccatcattgttcttctacctacagacatctgttgtattccataatagcttgaacatacagctcctaattactctaggaatttatcccgactccctaccggtttcagtttaattgagtagatcaccgccttttctgataatcagccttctcgatttttatagtatgcacttcatctttcctcaattatggtccccagaaattcattcttcaggaaagaaatgtttgagatagaatgaaaatcaatcaaagtcataaaaatcataatacaaactggctgaaatgtttaaaataacacccaagttttatgtgactgcagcctcctagtttcagacttcaggaacaggatgtggaaacagcttgtgtctttggttatataatttgcccccacagaacttaaaagttattagcaattagtagacttttctatgccaacttttacaatcatatcttagacacttccttagaagttgtctaccagttaagtatagtagagcgtcccatcaggaaaacatctccaaacaatgtaagtcccgcctggactttgggacagaatttcatatctctgctggtacctgagaacattcctcaatgtttcagtggtattcaaatccaattcacaaagtccaatttcatattcaaaacactataagtgatttaggttaagaggttagtagactagtttatttcaaatacacccacccacacacactcacacacacacacccacacacccacacattcacatacacacaaacacatttatggtgagtttaaacctccaatatcaattctctctttcttctttactctcctcatttattttgtttaaaattttaactatcttaataagtaaccgaaatgcattctccaaatgcctaccttcacctttgaaatccatacatatttgagcttatgtaattaatttcaggaagaaaaatttaaaccattttgctcctagtgattacttcttttatcagctccaaaactctgcggcatggggtaaccacaaattatttctggtgattctttgagatgacttcactgttctgcttgctccaccaacatcatttccagaatcacaggcaatgtgacaccaaatggctaccaacagaaacatacctgggtgaggccaataggaataaactatctggagtgtggactgtttagggcatgagctatagaactgaaaagcaattaaaatgactagaagtttccctcttttgattatcatcacaagccaacaaatctactcggtgtcaataaccaactgttatttcttgagtaaaattaatatagaaaattatattgataatgattccttgttttgtattgtattttgcattgatatagtttttcattttttcttttgtcctaaaatggagtctcactattcaggctggaagacctagaatggagatctgcctgactctgctgctcaagagctggagttaaaggtacacacaaccattcccagcttgtaggtctggtttctaaataatgagtagaattcttgaatttcaataacaccttaataggttctaaatttgcatattgtactgcttatcttttaataaaatttatagtccacatggaaattcatttgtaaaacccacttcaatcactccccccccagtccattcagtgtcagttaagcatgttttttgagattaattgcataatgattgagaatagttggagcttagtctatgtacagtattaccagtctatgctactaaggtgctatgtttaagcagaagatgtgaaattaaccctgactgagtgacaggataaaacttacatcctctttttttgtttgtttgttttgtttttgtacagtcactatcctaaaacaattgggtgtattcacttgtgaaaacaaacaaacaaaaacattaaaatttaggcaagtgagactgtcaaagaacaataattttccttggtaaatatggtttttagttcataagtaaaatatgcgcagtagagctggattccagtttgatttccagcacccacatggcagctataaaccatctgtgacttaaaatccaggggatgttatgttttcttctgctcttgtcaggcaccagtcatgtacatggtacacagatgtgcatactttgaatatatatatattcaaagagtaaataaataaaaaaaataaaataaaatactgtattcaatttgattgctttaaatcacatttttttcattatttggcttgctatttattatttatttttatgtagaatctgaaaactgctaaaacttgatccttctgtcttcatcttcaaatgctagaattatagatactgttaggagccaaatctcatatggggaggggtagaatgggttgtttgtgcaccaggtgttagtgtagactggatattaggaagccattggcctaatggatctcattggcctaatggatctcattggcatgagatcctaggccatacttggccggccacatagttatatattaaactttacacagtagctccttagaacctcagctcaagaaaagaaacaactcaacccagtcctccacccacaggctcagtaacctaggcaacccttcctggacctcttactcatgaactctttaccctgccaaacgtcctacttgtggcttcctaatatccagtctacactaacacctggtgcacaaacaacccattctacccctctccatatcctgctctactgactatataagctagcctgagaaaagtaaagtttgccacttgtgccacttgatcagaatcctgtcttgtggtcattctttctgcatctcttgtccccaaattcccgatccctgactcttttgccccaggttgacgtcctgcaggtcaggacaaagcacgaacccatacatctctttttatgtggtgctggtattgaacccaaggtttcatgcatgtcaggcaagtgttttccaattaagctatactccagacattgcttattatttttgcataaaataatgtgtattgccaattatttcgaataaaataatgtgttaatacattatataattattattcattattatagaatgtaattttaaccaatgattagaaatgttgaaatgattcaaaactgagttcaattcctgagtacatcctgagagacaagacccaagatgcacaggctcatatgcctgcagtgctaccactctgcaaacgtgtgtccacgatcactttctcagcttgtttgttgttggtatatagaaagctacagatttttgtatcttgctacttcgctgaaagtgttattcatttctataaattttctggtggaatgccctatcctgcaaaataggaataattcgactatttcttttctgatgtatatccccttaatttccttctcttgccttaatgctctagctagtgctccaagtactatgtcgaaagtgggttgagaaagtgaacatgcctatctcattcctagttttagcagacatgctttaagtttatctcctcttaggatatagtcaaatatagtctatattatgatgtggtaggctccacccagtcctactctttctaagacttgtgtcatgaaggcatgttagattttgccaaaggcctttcctacatctgttgagactatcatgccaggattttgtttgtttttaagtccacttatattactcattgtgtttagtgacttatgtatgttgaaacattcccccatggtaaacttggtaaataatctgtggtattcttcagaggaaaaaaaattacctaaaatttatatgaaatcacaaaagactctgaatgtccaaagcaatcctaaggaaaaaaataacaataataaagggattaccattccatatttcagggtatattacagaagtatagtaataaaaatagtatggtactcatacaaaacaggcaggtagatcaatgaaataaaatagaagatccagatataactatgggcatctgatatcagacaaagaggccaaaaatacacataggagaaaggcagcataattaataaattgtgcatgggaaactagataaccatatgaagaaaaatgaaattaaagccatatctacaaccctgtatcaaagtcagtttgaattgtattaaagaccgttttgtgaaccctgaaatgttgaaagtgctagaagaaaacataggcagaagtctgtaagacccaggtatatgaaagcactaactcctctggattctaattgtccaagaattaaggccagcaattgacaaatgggaaacaatcaactgagtgatgaagaacaccacagagtataagagaatatttaccaattataagtcagatagaagattaattctaaaatatagaaagaactagttaacaagacctaacctttaaaaaatcagctatggatctcaacagaaagtcctcaaaagtgtaaatggctaatgtgacaagcatactcaacaactaagggaatgcaacctaacacaccccatgttttccacatcacatctggaggagatcagtaacatacggaattgcagtaaataactactgatgtgctaatggatggatgtaaacttcatagtataccaaagttcatgatacaccaaaaatttaaaaaagggtacaacccttaccaactcttccggagaggttgatattatcatggaagatcagctgactgggcgaaatcatgattgaatttgtggacttggattctgtatcgggttaattttttatcggcttaatctaacatcctgtgccaaagaaaatcattattccaagtttcttgaggcgtaaagagaaaatacacagtgcacacattcatttcctgaaagctacaatggagatggcaacacagccgcttaaaagctgctttccccacaaacactgctagacctcgggaatacacaattttgttctctaagcctcttcatttcctcaagttccttatctgctacctaaagaatgagtattatcttaaagcataaacgatcattgaggaaatgaaagggtgcaatgcctgcaatcaatcttttgatgaatctgtgtaatcattacatacaaaatcggtgaaaatgctggaatgttttgcatgtttaagaacacataaataaatatgcccaaagatccaaacctgcctcaatctgtacaaagttcattagctcagttgatattggcttcatttgatccttagtagcttcacttgttaatattccttaaagcagtgattttcatagtgtagctaacatcagcatcacctagaggacctgttaaaatgcagattactgggacccactcccagaatttctgattcaggctggaggcagggacaaaaaggttgtggttttgaaaattacaagtttacactgatgtttctgtacaaagagtacactgtgagactctctgttttaaactaactgtccttatgcacatgcccaccacctatcagtccactttctaacttcagcctcttctatgaatgtctacaataattctgcattattcattgcccagaaaagctttaatattataatctctattagttgagctgcatctatcattaataagtatgcaattaaagataaatattaaaaacaatccagttggtagtgtcacatgaatgaatcctaaagtttttttcaagaccatgtcatttcactacatcatatataactaatatttaatataaaattaatacaaattcaatccacttcaataaatagaaataatcatgcccattagttcaataaagtggtttatgatagtattgtatctgaggtggtttcactttgagggtagggacagagaagttgccaggatctctaatggaagaatgttgagaccagatatcttccaggcaagcaccacaaacaaaaatgaaggagaaaaaaaaaacctgtaaattgccagaatgtcttagttacttttctaatgtggtgacaaaacaccatgtccaaggcaacttataaaaaagaaaagaaaaaaaaaaacatttaatttggtgctcacagatacaaagggttagagtccatggctatcatggcaggggacatgaaagcaggcgggcaggcatggcgctggagcagtagaaggaggtttacatcttgatccgcaggcatgaagcaaagaaagctaactggaaccggcatgggccttttgaatgctcaaaattcaccctcaatgacaaacctctaacaagcccacatctcctaatccttctcaaacagttctaccaacaaatatgtgagcctggtggggaaggggatcatcctcaataactatcatagaatacatgagtaccgagtgagcctggtggggaaggggatcatcctcaataactatcatagaatacatagccctttaactagtgtttattgaaaaacaaataacaaacctaaagattggaaacccagaagatgggggataattaattctcactcttgaactgggaagatggtttgagggctgtggacactagtctcacatgtagagttagagaaaggtgagccccacatagagctgaggctctatgtgaacatgggtactcaccacaagattccaaagctccattcatacaggccacaataggatggaactccaaaactgcgggctaccctctgcctaactgtacacagagaacctctaaagtatctaagagcacaaagttagagggagaccctgaaagtagaatctaggctgcaaacgagccctacagtgtatagagtaagaggtagaacattggagggaggcaaattctgattaattctttcctgtgtagtatgtgtaactaagttaatcactctaaagccagtttatttctcctatgagagttcctactttacagaacacctcaatacacctttctgttgggaacaaaggtcagtttatatatagacaacatggcactgatatggatttccggattagaccacagaggagggtaggtactatgagtcagcacaaaaaatggctggcactagacgtccaaggtgctctgaagtaatctgttatataactattttttggcaaagttccacttttatgtgaatctgtgtaaatacagccttggagaggcccgcctggccacctatttgtctgcaggcctatgtgcctacatctgtgttgcctgtttgcttgtgcaatgctgtgtgcaacaagcctgggtgcctgccagctgctgtctacccagcagtctgggtggtgggctttgagcagtgtaaataaagtatgtcttatctacctgacactcctcaaaatcccttcaaccacttggcttcccatagcttttcgggtctcctggctttggagcttggtctttacactttcttaacctgtttgacctctctgtgcccttgacctacttctgatgtcagtaaacctgggactgaagattcaagtttattatttgtgtttctggaattaacccttacctaactaatccagactctcagatactctcctgctatgacacaattgataggttaggccttttgtatcacagagaaacatattaggacatagtctgaaagtaagtacctaacagccatctttctaaaagaaaaaattaaagcagcactgacttgtagtgtttgccaattgctgtggtgtaatgttcccaacaggccaatttcaaaccactgacatgtaatccctgagcagagttgcataaggtacagggatcagctttgacaagattgacctggcatttagtgaagctccccaaggtgataaaggacactcactcctcccagctatattctaccactctcttgtcttctgtctttccttccttttatggtagcatctcacaaatcctttctcctttcttttttattggctaattcttgagaataatcagtatcattcaataattctatcaactttgcctagccctgatgtatccctaaaattctacaattctattctctgctccaaaaacacacataaccaagagagtacacaattattgtcactgaataagtgttgaaagttaattgaggcctcaggagaaatttgctagaaatgaaaacaacaagacaaaacattagatttgtccttagaatgagccaatagttgtcatttccatgtcttctgcttttacaaagatactgcaaaattttcactaaaacatgaaagtcactaaaacgtgaggaaatagatgccagtgcagatttagatctacaaacccaaggctgccatggattttccttgtaaaatttacatggacattcactctctttcgttatagatgatgtccaaatgctcctctgggtaggattatttccaaagcactgcatctgtggtggcttgaataggttatggcccctatagactcatacgtttgaatgcttggccctaaggaagggcactattaggaggtatggacttgttgaaggaagtgtgtcactgtggggttggactttgagggctcatatatgctcaagccaggcccagtgtaatattgcttctgctgcctgtggattgagaagtagaactccaactccttctccagcaccatgtctgccggcatgctgccatgcttcatgccatgatgataatgaactgaaccactgaaactgtaagctgggcccaattaaatgttttcctttataagagttgacatggtcatggtgtctcttcacagcaataaaaccctaagacaacaacctgcaaggttgttcctcctaacctgttctagctcccctcagtattctttccaatgcctttgtaattaagcctgtaatcccagtctcctcagccccatatcatcctatgcccaaggcccccctgctaagcaggcacaccacataacatcacataacacaacacaaaagcatctcaagctaagtgagtttctacccaagagtatgcagggctcctgggagccgcaccacatagaacatactgtgggctgtgctctaattcaaggcctcctgtcaactgcttgggaattcatagtcaggtacatccagacaagaacagagtgctcagatctgcagaccagtaataaagctctttctggaaggtgcatttataagttttctgcctagtttcagagacagagaaacaaacttattatggggctcatcttattcttaggcatgaattgtataattcaactctcagaaatctacagcagaacaattgcttcatattagtgcagcttcattttatgctctgtgctttaaatgttcgcctctctgtttgggtgctctcagctcctaataagaacactttgaaaagaaggcagcattgtgaaacaaccttgggtttaaacttctggctggattgtaaatcaaggtgcagtgccatctctttaaaaagctactgaactctaagggaggccacataaaattctctgtttctaaacaactttgctttgagtgatatatatgccccattttctttactcagcttctgttattgaatttttgttcatttatttcattcaaatcagcctatatacatgctgccctagtttagaaatagttaaaagatgatcactttgcaggtgctgcatgctttaaaaatatatgcaataaaatacaaagacaattaaaaagtaattgtttgcatagaaatagactaattctattgtaaaaggcttagcatgcattcagaaaagtactgtatcgtgaaagtacagttcacatgttatttatttattacaaatgaaggcaagaaaataaccaaatgaagaaaactgaaaacatatgaaagctgaaacaaaataaatacttttcattgaagtaataaatgcaactgttgacccaaatactagcaacaacatcactgataaaatctctaatggcacaaatactgtaggttcctcttttgagtattttagctcatactgaaaatgtagtaaaacttctctcaatggtcctataggggtaacccagataatccaactccatcggagaatattagataggaataaaattctgtgttcctgctggcatgccaaaatcatattctgctaatatgaaaatcattcatctttgagccaggcactgagagcattaggagattaatgtgggagaagggcagtcatgtactacatgcctgatgaccagaattaaaggtgatatgctgggtgcttaacgtgcagcctttggctcccatctatttggctttaaacttcagttcaacctctcaatatctgtggacttgtgggaattatttaacttatctgaatctatttcatttctctgcagggtgcgcatttgttacctgcctctagatcattgtatatttaaccaaagtaatgtgctaacacagtgtctgtgaaaattgaactctcaagtattaactattgttataactgacctatgggcttgaagcacagtgatgacacatgaaactgattcccagacaggacacattgacaatggctcagtcttctgtaagcacaaacaaaagcaagatgtggtcccctcagggaagcacatgtctaagtgactggctgaaaacttacctgtaactactgggccactatcaggtatagcctgagtgatcaggaactcttgggatcacctaataaaatattataaagtgtctcaaggggttaaaataaagtggggattgctaaggtgaacacaacttggagccatgtctctaaaaagttgcagcagctacttcaaatgaattggtatgccaaagagtactagtttcttcctcatgttggatccagccttatattctgcagaactgcaaggatatggccaagctcataactgtcctctactaatatgcaagagtagactacaatgtgataacttcaatttagacagtattgtgaaacatcaatatatatgtacatacatatatacacatatgttccatatatataatatatgtatgtatattccacatatatatgttgaagccttaactgccagaatgattatatttggaatagggaattgagattttacaaaactatggtgaagctttgactgggcctcctggctgagattatattctctccagactttatagactctaaacactgcccataaaccaaccttgaaatattcctagttggaccaactgtgccttatccaggttccttgtttctggacttctgttcccatgtcccatctggcacagtagacttttttgagaatgagagaagaaagtggaagtagaaataacattgactactactaccacaaatgggtatctaccccaacacgagtgtccacactgtcttgtgcacattacttggcattcccacaggcttgaaagttagaaaaccatccatcagaacttttcatgagccagttctctggcttgcatagtaccctttagaaatgtatgaagttcacatgtaaacaggtagtaggtgatggcctctggggacaaattatagcccagcaggacacataatactaaaatcaaacattaataataaaaattgctatcaaaccatgagaaatatgtctctgtctctaggactcacagagtagtgaggacctaaatgtgtaaaataagcaagaactctgtctagagaaaataaaggtctaatgacagactggagtttttggagtctttatttcagcattctttcaataaaaactgcctcttggattttgccctagttctttttccctcaatttttcaatttatattagaaacaagattgttttacatgccaatcccagttccctctcccgccccacctcccctgccccccactaacaccctacctaccccataccaattctgctccccagggagagtgaggtcttatgttaacataagaccttgccctagttcttatataagccatgctttgatagtaaaccctggctaataatccattactcatgctaattctgagaaatgaaatcatgtatataagaaaaatatacatactcaaaaaagttggttcctttatgtgtagagaagcattggatataatgaaaggaacattgctccacagagcacagaattagaggcagtaagagtttctacattaagtagccagttgcctgaagactaaacaagaaaaacagtaaggtttgtctgatatggagacaaagtgggacaggcaccatggcataagacctgcttaatcctatcctttatctagtattatgtgaccccactggaagctctctttttcagctaactttcttatttggttccactgcattcagcctcctgcagaggttgtccaaaacatgaggagaaataccagacctatcagcaaagccgtaatgtctccgaggaaatgatggcatgttgaacatgaggtaaggctaacaccatcctaaaaatggatcagagatgagataataaatgtagaggcactctggaagaaagaagcagtatgcttctatgtgttgctactattaatgaggggtgttaggttcagaccacacatctcctggctggacccaaggtcacacaatcaaacctcagacaaagcatagacagttcctgtcctgactgatgagccaaagccttcgtcatcctttctctgcatagacactgaatgttactcagaaagctgtgtcattcttctttcaaagtttctgatagtttctgaatgaattttaggtgatacctcagggtttctattgcagtgaagagacattatgaccatggaaactcctttaaaggagaggttcagtccactatctcattatggtaggtcacagctgcatgcaggcagacatggtgttggagcaggagctgagaacactgcatcttgcaagcaacaggaaggcaactgacacaatgggtagtatcctgagcataggaaaccttaaagcccacccccacagtaacacactctaatgaggccatccctactccaacaaagccacacctcctaatgtgccactccctatgagcttattgaggccaattacattcagactaccacaggtaagatctttcattcatgtccctgtagaacacccctatgatgtatggggggtgaatctctaatatccttgaccttagttatttttcctatcacatctttaaaccatttatgttcattggactaagcataaggacacagttttaaattagagatcaactcaagacaccaagcaagtgggagctgtagggggacagtgtaagccacacctgctgatatctcaagatgatccatagtttgtaaggttaagatatctttatttagataacaccagccaaacacaagccaggggcagcaaggcagggaggccagagagaaggggctcccatgtgccttgcagccccttaaaaccttaacacgaatcatcctgaccttaccttgactatatcctgacaggcgtggtcaggcacacctatagccagcttctagcaggcagggcttacactgtccccttcagaagcctagtgagttttctggacttcaattattttaaactaaaccacagcaatccctctagacataaaaggctttgcctaattttatctttttcctggaaatgttcctctagaaatactagaactttaaaagctattctgtaatctatcattccttcacccttccacctgccaaacaaacactctcaaaccacagtgcttaactatgaaccctacactaaatactgaagactacaaaatcaaaacaaaccattttaggtaaataaagcacccaagataatcttaattattcatcccaatatttgttttcatttatactcaaagtacaacagctacactataggaacatttgtatataagactacggccacaggtcctcataaatctctaataagtatattgattagcattgaataacagaactgaatcataaagatctgtattgaaagcaccatggaacctatggggtctttaaaggccacattgttcaacatccacatcaagaagcagcatgtgagatgcagaggaaagaatctcttacctttggccatacaactgggctataacctgacctttgtcattaagccaagaggaaagcttgccagtccatctccctaccctccaaaaaggaaagcatctttcctgattctgagacataatattgttgcttttcagatattctaacaacaagaaaactagagaaaatcatcagtaccatattttaaaattggaggtcataaaaattttaaggtttctttttagagaagataacacaaggtcacatgaattaaaatatgtatttaattatggaaattattcataattaatattaaatcacagaatgcagagaagtagcaaggatttgggaaaaggcttattatcaccaccttctcctcaccaccctctcccacccccacccccaccccccactgttcagtcacagcatggcaaatagctattcggaaacgaaaattctcataaatatatatatatgccatcctgagtacccctccatttcaataacactaattgccctttttttccttgctgctcctagccatatttcttggaaaacaacagctgtgtttattcaaatagcagcatactgatgacttgatgatagggtaatctgctggaattccaagtgtgatggtcccagagacaacttctcggcataccagaaaagtatcctttgcatagtacaaagctttagaaaggaatccccacttggttagcatgggactgggtgttccttatttcagtctcttccagtgaggatcatagattcttgttcttgccaagtcatctttccatgcaccattgtcataaagtaaatctgcaacatgaacattttcactccaatagcttctaagccatggattaaacagtgccttgaattacaatgaaaacaggcgaatgatttagttcaaaatcaaaacagtaaactccacttgttattttctctgactcaatgggcactggaggggataataacagagtcagaagtcatttactggaaaaacaaaatgaaacaaaacaaatgagcaaacaaaaacctaaatacccatgggaatgtaattaattagcaaagattaagctcccactgtagcaagggttaagttctcacatgaccttagtcatcttccctgatgactagcaacatgttacacaccaagtgtaacaactataaagcatgcatagaaataaactaacttccaaaatcctgatcaacatttaaaaataattgagtagttggcctcttttaataaagataatgtgtataacttggtaagttctagatttctcctctgatggtatatatcaagaactgaatgctttgctacaggtggaattacaccaatttaaagaacagaattggtatactgaagattatatttaatggcataacaaatctacatataatgcaaaatattttaggtgttctcttatgtacctcaatgtacattagctctttcagtgaaaggatttttttattttcttacagataagaaatttgaagcacacaaatgttaccttttgcccaaagccatctggtcaataagggaaagagtgaggcttggtccaggcctctaattctgtgacgcctgttcttcccccagacaataagggacagagtgaggcttggtccaggcctctaattctgtgacgcctgttcttccccaggacactgtgccactcctaaaaaaataatatgcaggacccacacacacacacacacacacacacacacacacacacacacacaaaacaatcaagtaccaaaagcaaaaaccattacagagaacaataaccacgtatgctcaaagaggttttacataagagctgtatataacaagggccatgctaatggagactggatttcaggggtctaagcacaaacattttgatgtacagataaacctgatgcatgagagattcaaaattaactaaggaagccgagctccagcaaggagcttggaactttttcaaaaacactgttctctgtgtttcctggagagaaaaacaggaaatgggcttctaaaaaagtctgttcaggttgagttggactttcaaaagacttccttgccaaatgagtttctaaaaggatttatggaaattgttcttttagatacatttgcatttggtttggtttggtttgatttttaatatagtaaaatgctaccggactagactggtttagagaattccagaaagagaccaaactcagccatgtgaaggcattttggtctttggaacaaagtgagataagtactcaattgggcagaccatgaagtcacactctgtttcttctgttgctctagaatattctaaacatcattaaacaaattctgaaactcttctgcatagattttatctgctgcagatttaaagaagaagaaccatctacaagaaaaatggcaatttcagagcaaatggcaattagctaccatgcatgagagactgtcttctaaattttagggaaattcccaaggagttggtaaaataatatcatttttcttctcttttctcactgtatgtgtttctacataaatctgtacttactatatacttatatgtgtatataaatacatgaccatgagaattattgttttctccttattgtgtatgtgtattaatcagcatcccttaactacaaaaaataactataataaatcactttgtaatgaaaacagatttattgtggctcacagttttgggagttttcatccattatgaattggctccattgctcctggaaacatagtacatctcagttggaaatgcccagaagatgaagtctctttaccttatagtgaacaggaagtgaaaaaggggaaagactaatgtcccacgacccacagcaagagaacacctctgtctgaagatttctattgctgttgagcaacaccagggacaaggcaactgtaataaaggataatgggatggtttacagtttcagagatttgatccattatcttcatggaggtatgtaagcagacatgatgctggaaaaggatctgagatttctacattttgatctgcaggcagcagaagtctgtgttcacaatgagcaaagctttagcatatgagacctcaaagctcactcccatagtgacatacttcctcaaacaaggccacacctactccaacaagatgacactttctaatagtgccactccctgtaagctaatggagaaattacattaaaactaccacaaccttcaattacctaaacttttccagtaggcaacacttcttagagctttctactaccttgcattggcaccaaagtggtgaccaagtctttaacatgtgggcctctaggacccagcccagagccaaactatagaaatgtgtgtaaaatgataagtataaaatgtgtgtaattatcataagtataaaaatcaaagatcagcctggcatagtagaacaggcttttaatccaaacacttaggaggcagaggccagtctctgtgagttcaagtccagcctgatctataaagtgagttccaggacagccaggaatgttacacagagataccctgtctcaagaaacacaaacaaacaaagaatcaaaatgcacaaatcagactcaaaattgtatcaattcccaaaggaactaaagtaataattaaagatagaactaaagaaaacattccaaatctgaaaaaaaagtcataaaactatgtttcttaaatagttcgctatgtgtcccaggaaattttaaacaaaaaatatcaatctagagaaatgcttgagatccaaaatatcttataagtatttagaactatctatgtgtattacatgtgaccacgacactgaaaagaacaacaacaacaaaaaaggtgctttaaggcttctgctttgtataataaagagtgcaatggaaaagaatcttcttctttggttccttctttatcatttttcaataggattttattaaccattctacaactactaaaacatctaaagactgactcagccaacatagtgccagagtgtgtatgtgtgtatgtggtggtggggaggtagggtgactcttctgtttttctccttaagttggtttcttttgtgaaatgactttgaagcctgcaacttacattgtcttctcttgatctacaagattctggtagtatgatgacaacccttactgttctttccatctgatatgaccttttgtttttcctccttgctaattttagccttttcagaatccaattgacgtatctctcattataaggcctatgtgctttaagaagtaaattctttttggctctcttatctattttttaaatggacaagtaattttttttcttaaagtcgggggtctcactatgtatggaactttccatgtaaactagactgcccttaaatgcaacttggtttcacctgcttctgtctcctaagtgctgatgttaaaggtatgcactactacacagcctaaaaaaggggggggggttaggagtagggtggaggggtaatgggaggggaaggagagggagaagggattgacatgtgaaacaagcttgttcctaatttgaactaaatgatcctttcctcctttcagaaaacacattaaaaatcagtcagctaacttaattagaaaattatttttcaagcccgatccccacatactgaaacctcaaagacctggcagcaccctcaatcatcacccactgcatcagtgaccaccagagccttggccctgcctgcacctggatgaggtaagtgtgtaggctcctggctggatggccttgctctctaggccatagccccaggtgacacatcctgaattccacccctccccactgaagcctcagagaccaggcagtaaactcgacacagcccaaccatcccccactgcatcaacgaccaccagaactgtgaccccacctgcatctggaggacgctcagagacctggcagcagcctctccacagccccaaccatcccttaccacatcaacaaccaacaaagccaaggtcccaagtgaacctggagaaagaccacctaagccacagaccccacctgcaccaattggaggaagaggaaccccctgaagcacaggccccacctgcaccaattggaggaagaggaactccctgaagcacaggtcccacctgcaccaattggaggaaggaatacattcaacaacataagaggattactgcaccaccagaaactagtggctctacaacagcaagaactggacatcccaacacaaatgaagcagaagaaaatgcccttaaaaataacctcatgatgatgatagaggcccttaaagaggaattgaaaaattcgcttaaaggagtggaggaaaaacaaacaaaactggaaggaatcaataaatctttaaaaaaaagcaacccctccaaatcaaacaggtgaacatttcaagataggggattcaaagaaaacagttcaaaggatagagctttcaaggtatgcctgttattgtaacagaactttgtgttacccttcataatataactagaatgcaacactcctgaactcccactgataacgaatgtccattctgaatcaaaaagtacaatcacatttatgctttctgaactgaaatcgcacaaaatgttagctctgtggcctccacacacagagtaactgatttcattgttggtagctcacagtacacgtttagataggaaagcctttgagaagtcctttgaaagagaaatcactacaactttgtttacctctgttttcacaaacttatttcatagcagcaaattccttagttaacaaaatatcccattcacccatgtgtgtattctatcgaaaatggaaagaaacacggcatgagatgaagattcagaatatagaacaaatacacaggttttgctgtgttcagactaaatgctataggcttgcaaggaacattagaatctacattttaaaaagcaatatcatttgcaatcacaccaaagatgagatttagtcataaatttgcttatgtgatctaagtatatgcaagagttgcacgttagaaacagcaaaatactgacaaaggaaatcaaaacttaattagaaaaataaatagatacagggagctggcataatggctcaaccagtgagtgacggtgcttatctggcgagcccaacaaattgaatgtggaaggagagaattgactccacagaacagtgctcttacctccacaagtgtccatacacatcatatccatacacacaaatgcacatgatagattttaaaaagaactttcaagagaactaaacatggatattttatcacaactttatatactttatactttatatactttttatactttatatactttatactttaaatggtccccaggaatggaaatggcatgaactcccgaactaattgaaaacaaacaatagttgaaaatacacaagtgggtagagaagcatttgattaataaccatatgtacaataaatggaaaagtaaataatgctttcacacagaattaaatacctggaaacctnnnnnnnnnnnnnnnnnnnnnnnnnnnnnnnnnnnnnnnnnnnnnnnnnnnnnnnnnnnnnnnnnnnnnnnnnnnnnnnnnnnnnnnnnnnnnnnnnnnnnnnnnnnnnnnnnnnnnnnnnnnnnnnnnnnnnnnnnnnnnnnnnnnnnnnnnnnnnnnnnnnnnnnnnnnnnnnnnnnnnnnnnnnnnnnnnnnnnnnnnnnnnnnnnnnnnnnnnnnnnnnnnnnnnnnnnnnnnnnnnnnnnnnnnnnnnnnnnnnnnnnnnnnnnnnnnnnnnnnnnnnnnnnnnnnnnnnnnnnnnnnnnnnnnnnnnnnnnnnnnnnnnnnnnnnnnnnnnnnnnnnnnnnnnnnnnnnnnnnnnnnnnnnnnnnnnnnnnnnnnnnnnnnnnnnnnnnnnnnnnnnnnnnnnnnnnnnnnnnnnnnnnnnnnnnnnnnnnnnnnnnnnnnnnnnnnnnnnnnnnnnnnnnnnnnnnnnnnnnnnnnnnnnnnnnnnnnnnnnnnnnnnnnnnnnnnnnnnnnnnnnnnnnnnnnnnnnnnnnnnnnnnnnnnnnnnnnnnnnnnnnnnnnnnnnnnnnnnnnnnnnnnnnnnnnnnnnnnnnnnnnnnnnnnnnnnnnnnnnnnnnnnnnnnnncatactatgatatatacatatacatgtatatatgtttatgtatatatcatggacccaggtattatacacacacaagaaaagcacaacaaaatattaatagcagttacttctagaaactgtgatcagacaagttttcactttattcttcatacttttcaacatcttaatcaaaataataaacattagcttcaaaagacacacgaaacagaacaatttcttccttctaagaattctactctgtccttcaggtagcacaccattattaataatagtgcttattgagcaggaataatctcttttcagcatgaaacattttgtattcgtgcaaaaataattgtaacacctattagtcttaataagaaaatgtgctcaagttggatctttttcttttttctttttcttttctttctttttttttttttttaccaaatacctaatgttagtatttaaaggagagtctgactggaagaggaaaaaaaagactatgacaggcaccaaaatgttaaaaccattaatgagttaaagagaggaggatggaggctggaggctagaagcaaggaaattggcccaaagattcagaatccatctaattaagacagccaagaagcaaatctacatgtaatgcagtagattttaccatcaccaacacactgacactcagacacactgtcaggctccaccacaaaagtggcttccaagtaattttctactgtttgttcagtgagtcccttaagccccccaggtgcccagttttccctcacaggatctcctactccaaaaatgtctccagtaaaacacatgtctaggggacattttccctacattatttccaagaccagtaagtgacagaccatagctttgctaggagttaactgtttgatcttctttgtaggtaacattagggcatatgctagtgatgaaagctgctttctggagcgatcgtttctcattaagtaatatttctcccatagcctccagattattgatttttcttcctcttttgttttctttaattgtatctttccatttgaactttgcaactctaatatatgacatcataaattgctttgggatataaattgtctctgagctctgtgagcaagacatttctatcccttccaagaaccagacaactcaacaggatgaacctgggccattccaatgtgtgctgttccttctcacacagattcaagtttcaaatggctgtaatggcctttttttgatatgacggtgtgctcttctttagtgatcttttcagctcaacttctgaaagaaagaaaagtgaatctctcagcgcatgcacttatattcgaaactttttttgtaaaggttttctcccataaatataaggggaacattcattatcattatcaattcattggatcccagactgatgtagaggggggaaacacagcctttcaattacattgaggttcctgtctcagctccacagaatgtttaatgactccatgacatcatttaccctctcaagtctccatatacttttatgcaatgaaagtttaaaagtgcctttctcatgggatgtaatgatgaacaaatgacattaattaaccatgctctgtaactgttaaatttttcacaattattttattctactttgatctattatcatgaaaagttactatccctattgtgtctgacagagtccaagagaaactcacatnnnnnnnnnnnnnnnnnnnnnnnnnnnnnnnnnnnnnnnnnnnnnnnnnnnnnnnnnnnnnnnnnnnnnnnnnnnnnnnnnnnnnnnnnnnnnnnnnnnnnnnnnnnnnnnnnnnnnnnnnnnnnnnnnnnnnnnnnnnnnnnnnnnaatatacggatatatatgtatatatatatatatataatatatattgtatatgtatttatatgtaatataaatagggcatttttggaaacaatcattttacatatcaatcccccatcccctctccctcccatcctcccatacccgctaccaaccctcccaacccatccccacccactccccaagaactgaggggacttccatgggggatcatcaaagtctgtcacatcatttgggggagggcctaggccctcctctgtgtatctgggctgaaatagtatccctccatagggaatgggctcccaaagtccatttttgtatgagactatcaatatgcacatgtgtttgcacagatacagaagtatctatgatgttctctctttgtattcgtgtgtatgtgtgtatgtgtgcctctaaactacatgaatgtgtgaatacatatatatatccatgcattgatactccatgcataagtgacatatcaagcttctgtgttgccaatctcaatgaacatggtaactccccactttgaagataagaaataccagcaggcttgttgtgagatgtgctttcaacatgatcacaacactggttgttttcaaagctgttggagaaaaaggacagagaaaaatgagtacctattacaaagtcacagacatactactggaaaaaaatctattttgacctttgttcacattccatctgttctagtaactagagtgagtttacaggttcacaatgactcaggtttcatttacatcctcagaaaaaatagcaattggcaatacttggcagtcaaggtggaacccaaaatgagtgacagatttgttgaagacattgtcatgagctgggaaaatgtgataaagatgctatcctgaactcatgcattgaaagaacctcatgaaagacatgttaccaacttagaaaactgtcaactaaaaaatactaaaagcaaccccggaatagtgataatccacaaaattctatattccgagtagaggtataggcaaaaaccccaccctgaagatggggtggggctccagagggagcttctcagagattccacatccatcaacttggtccaacctaccatcatgtcctgttgaacagttgcactattagcatcctagctgttctcatcctccatacttgcatccctacaattctacacacaagcaaccagggaaatgcctttaaagaatgaatataagcatgttacttctctagctacagctcatggaaggccttctataaacatctgaggtaaaatcccaattatgtgtcagagcaaacaaggccttaattgatatgaacttcttctagatctttgttccctattcctctgcctcaaccacctgacctccttgctcttccatagactctacaagtgcccactggttttagcatcctagaacttgctaagctctctgcataaaatgctcttctaccaacatgctaaaataataccttcaactcattacaagagacaatcttagggcctggagagatggctcagaggttaagagctctggctgctcttccagaggttctgagttcaattcccagcaaccacatggtgcctcacagcaatctgttatgagatctggtgtcttcttctgatgtgcagatatacatggaggcagaatgttatatacataataaataaaatctttaaaataagagagaatcttcagactgatatatatcccattcccgtcccttatatcccatcgatgttcttggcatcatatgcatagttgtgttgtttgtttattttctttcttccctaactagaatgaaagctttttgaaaatatattctgtttatcatcatcactataacatgtctaaaactgaacacaatgcataacacatacaaaatgcctaatacatgttgtgaatgaatgaacatatcaatataattcctgttttcaatgaacaatcagccagtaggggcgatccagacaggcacggctagctataatgcaagccaaggggatttaacaaattatagggtagtacaatgaagataaaattaaatctagctagggttagagaaggggcagagttttctcacacataccgacacttggacacacacctgggaatttgaattaggctgaaacagatagatgagatttcaataagaagagacacagggaccagactgggcccagcacaaaaacctgattgcatagatagatatgctcagtatgttccaggaacagcaaacagtcctgggagaatgccatctttgagctgaatacatggaagaggaaacagagcccaggaaaaagggatgtagattttaagggctctcaacttctagaagtgatgctgctttatgcagtcaagaaattgtttaagaacttgtttcaggtcagactccagtcagtgctagaggtacagaaatggaattccctgtacccatgtccaggatggatacatatacaaatggacaatcaatttcaactatgcaccctaacttgccaaagctttctaaaacttagggctcaatatttaattctccagaataatccttgactcctgcccaaacatataaaatctttctagaaaactctcctctgctaccttaacgcctcactcttgtatcctgtcgtctattcataacaactgttataagttattcagattagggtcaatagctgatctgaaaggggaacatcctgaaaaagggcaattttcttcagggtctgtttttttttttttaagtctaatcaaattactttagagctgaaaataaagacatctcaatcctatctcctacctaatgagtgttaagccaattgaaatgtgagtggaagaaaaaggcaaaaagaaactcacacctgatgatttattacaacatcattataacatgtaaggaatcttttctaaatctgtgcaaaaattcttaaaataggagtagaggtagaagaatataaagcagtagttcacatgtaataaaatattgtgtggtatcctgtagaccagtatttataagcatgtagttagatcacagcacagggttgtatggtgtgcattacttgtgcttatatattctcaccagcttaataatagccaaatggaagagaatttgtaacattctctgctcccaaccttctgcaaatcctcttcaagatgtcaagatgttagttctgacaagttcaagtcgtaatcatgataattagtatttgacactctgcagcctctttgccaacagtgcatgttgttcatttgtcaacatatagctgcaatatagaaaatatttatcacatgaaccacattttgaatcatttaggaacattttgataagctaaacacactgaagggtgcttctattactggttgttgtttctttccccctctgagctatcgctatttcattaagatacgattgtataagctaaacccatttaatactcattttgcttattgagttgagttccttcaaattcttccctgatatgtagacatagcatcacaaaattgacttgctaaccttaaaagattaactttgaattgatataattttcacacagacaactactagactctgtcaggtatccatttcctagtcactgtaagtgcatgaaaaggatacatgattattctgtgtaaaggttcatttcttttttatataaaacagtgtgagccatgtgataccacaaaaccatcagtaaagtcttacggtatttttttatttgaattagaaacaagattgttttacatgacaatcctagttcccttctccctcccgccctcccctaccaccctcccaactaaaaccctacctgtcacatatcctttctgctccccccccccggatggtgaagccttccatagtatgtcatcagaggctatcatatcctttgggatagggcctaggcccacccctgtgtgtcttggctcagggagtattcctctatgtggaatgggctcccaaagtccacacatatgctacggataagtactgaactactataggaggtcctgtagattaccgaggtttcctcaatgaaatccaggtgacatcagtcagtcatcaatctcattatcaagggagggcatttaaggtagcctctcctctgttgcttagattgctagctggtgtcatctttgtagatctccagacatttccctagtgcctgatttctctgtaaacctaaaatctctccctctattatggtatctccattcttgttatcttttattcttcccctgactcaagctttctgtcccctcatgttctctgcatcccttctcttcttcccttctcattctcctagttccatcccccgtcttcccatgttttcaatttgcttaggggatcttgaccttttccccttctccaggagaccatgtttgtctcttttagggtcctccttgtttactagcttctctggcagtgtggattgtaggctttactctctgnnnnnnnnnnnnnnnnnnnnnnnnnnnnnnnnnnnnnnnnnnnnnnnnnnnnnnnnnnnnnnnnnnnnnnnnnnnnnnnnnnnnnnnnnnnnnnnnnnnnnnnnttttttttttgctgagtagtactccattggtaaatgtaccacattttctctatccattcttcggttgaggggcatctaggctgcttccagtatctggctattacaaatagtggtgctatgaacatcattgaacagatgtccttgttgtatggatgtgcttcttttgggcatgtgcctaagagtggaattgctggatcttgtggtagactgattcccattttcttgaggagtcaccatactgatttccatagtggctgcacaagttggcacttccaccagcagtgaagaagtgttctcttttctccacatcctgtccagcagaaactgtcattggtgtttttgagtttagccattctaacaggagtaagatggtttctcagagttgttttgatttgcatttccctgatggctaaggatgttgaacacttccttaagtgtctttcagccattatataaacgattgttttctcatgggagttcaaagctaatgcgtaccttctgatttaaaaaaaaaaaaaaaacaagtaaaaatttaacttagaataatttaatgaaatttcttttccagaccaacataaggttcaagttcaagaacctatggcacctatgttggttatccaattgagaaaaaaaaaatcacaaatgttatgtacagtagtgaggacttctatcatgttaagataaacaccagctacttgtattcacaagtttaatattggactatttaaaattcttccaccatgttaagcagtctcaatggtctaattactgtgataagcctatgtatcaagacctgtgaacctcacttagtttacttcctcttgttaccaaggagaaaaatatagccagtccccgacactgaccctctgtgtggctttaatggctagttcagtatttctgaccatgggtggcctggcccccttatgtagaagctgataaatacctgctcagagatacccggtatttccccataatgtcagctagaaactacacagtatgtacacccaagccctgtagttttgacatttaataaagcattgtatagagagcaaacaaacataatcagggaaagcatatgagcaatgagataacctccttacagaaatgacatcacagcatattcttaatagcaattcccctaaaactgaattccaagattttttgccctggaattctgatacattattacagtctccaggaatgaacatttgtagattaaaaatactaaaaacaatacaagcttgtgaaaaacttcaattgaatcgaaaaacatgaagggattaggtcacaaaaagataaatttatctttaagcaatgtgtacctgataaattgtacatattcaaaagtccacccacaattccacttctggctaaccaaccttagaattaagaaacttacaaaaaatgttgtagttatgtatctgtattggaagtgggttgaattgcttttgcatttctgtctctttgcctatatagtcagtccttccttgtaaataatgaagaaaagaaggaagaggagaagggcaaggaggaggagaagggggataagaaaatacatccagaaactgcataagcagctgtatgaatttagagaaactcttcagtatccctttttttgccaaactgttttctaaagtcaggtttctgtttagtagtattcaggtattataatacttttatctctgacatttataagctattgttctccagcagtggttattagaagacagccatctacttaaaactttttaaacatatctgcattttcctctagagctctccagttggggatctttatcagcatctagttactagtcttgttacactcatctcattatcttcttcatgaatccatgacttacacagcctttctcttgataaatggcacaaccatgcctacaatcccaaaccacaaacctggttccctcattagtttctttcctctctcatctggactgtacttggttctgtttattttatttctatgacattacaccacatatacccccccacacaacatatacacactcacaggcatacatacacgtacacacactttgctctagctccattgctcttaatccatttgttataggtaataaggcctggaattcttgcagggactcttcagaagaccccagggataggtctcagttattaagcatgatgcaattagtagttattccatgagttgccctgcaaccttatccaagctgcatctcacttcttttaagaggcctccaaatctcaaagtcttattggttcacttttcctcttttgaacattctgcatgatgtgcaccttccctaccctacccctgttctgttctatcatccattcatggctacattcacagacacctaactcccctttcatgcacaagtttccctttccttgccatggttattggcaatgctattacttgggatcattttggttactatttccatcctgtgtttctcatgtttttttttctgtaaagtctattattttattggctactattgcaactttattatatacatttaacaataaagtctaaaattaatccatatcctaatcctttatgtaacaacataagaatgccaagcacatttaaacttaactccatttaaattctagtgtccatacctgacccctagattatcactgtcataaaagtaaataaaatgaataactgaaaatgaactttcaagagaaaaaataagtatatgaaaccagaatttgttttgttgctgcttgtagcaagttagacacttttatgctattatttcacttcagtatcaggttatctcttgtggaacatggaggagaagtttaggaaagaattacagagtccttaagcagaagtaagattagtgtgaagcatagaggacaaaagaatcagaccaaggagattactaatgatttctgaaacattctatcaccatgcacaaaactcaagtccaaatggatcaaagacctcaacataaaaccaaacatactgaacctcatagaaaagaagtgggaaatacccttgaatgcataggcacaggagaccacttcctaaatagaagaccagtagcatagacactgagagcaacaaatacatgagaccttctgaaacagagaagcttccataaagcaaaagacatggtcaacaagacaaaatgacagcctatagaatgggaaaacatctttaccaattctacctctgagagaggactgatctccaaaatatacaaagaagtcaagaaattagatatcgaaagaccaaataatccaataaaaaatgaggtacagatctaaacagagaattctcaacagaagcatctcaaatggccaaaagatacttaaggaaatgctcaacatccttagtcatcagggaaatgcaaatcaaaccaactctgagataccatgtcagaatatctaagatcaaaaaactttgttgacttacactagagaggatgtggagtaaggggaacacttctccattgctgatggagtgaacacctgtacagccattgtctcaatcggtatggcagtttctcagaaaactgctaatcaacctaccttaagacccagcaatactactttcgggcatgtacccaaaggataaacacaccacaaggacatttgctcaactatgttcgtagcatcattattcataataaccagaacctggaaacaacctcgatgactctcaataaaagaatggacaaggaaaatgtagtgcatttacacaatggagtactactcagcagtaaaaaaaacaatgataccttgaaattttcaggcaaatggacagaactagaaaagctatcctgagtgcggtaacccaaacccagaaaggcaaatatagtatgtggatattagacataaagcaaaggacaaccagcctacaggacacagccccagagaacctaggtaacaaagagaatcctaagagagacatgcatggatcagcctaggaaagagaaaaagacaagatctcctgagtcaattgggagcatgggggcagaggggaggagaagaggggaagaaggaaggggaggggggaaatgtatagctcaattaaaaaataggtagagaaagaaaggaaggaaagaagaaaggaagggagggagggagagagggggagagagagagagagagagagagagagagagagagagagagagaaagaaagaaagaaagaaagaaagaaagaaagaaagaaagaaagaaagagatggagttactagaaggaacatcatccacactgtgccagtgatggacccaagcacagaatactgtcaatatcaaagaggaaaaggtttgtatttaagaagaagaatgactcaactttttgaatgataacattgtatgtgcaaggatacacaaccttcagggaggggatggaaaactgcttctgaaaactcagcattcagttgtctgcaggaaggatacactatgtcctctctgtcgagtatttccagtcctatgagataatgatgttatcttatactcatcatatatttacatgatctcttggaaagcacggcatgttctgtgcttacttaacactctcaagttctccttcagaataaaagtatcatagcacatttaaacttcccaagggaatgcatcacatctttgaccatttttgtgtctgccagccaaactctccccaaattctctgcaacttctaataaatagcattaaaataaatatgcatctctccaataagaactctggcaatgccaagtcaaaataagcagattaccccatggcttctgcatgtcatgcatctattaatacatcttaggatcatgttcgcacttttaataatagcaccagcctgctgactcacatgcaggcatgtttctacttccttcttacctacataatgattccctttcttgtgtcagtttggtttattttttatctctaatcccatcctgtttagtttggccaatttttagggttttcatgggtctcttgaagttttgccctgacttccatgcatcaatgacaccaccaaaatgaacattttcttatataactttcaaacagtcaaagaatacatatgagttggagaacttgtgattatttgcaattacgtgggaagccctctattagctttgggggatagacaagcttgatttatctcctaatacattacactctttcagagatctggataagaagttagaaaactagtcagacagcagaagttcaaaaggagagctatactttcagcatagaatcatgggtctaaattttgtgactacatgctgcaatatcacttgacctccaaagagacagatacagaagagggaaaaggtaaaagatcagaatttatacaaatatataaatcagacctttatcccttccaacaacgatgcaagattgttagagatgaggaaactcagcatttactgggaaaggcgaactcctctaaggttgtatatctctagttactgagtaacagaattagattccagtcaagatctatatgactccaaagtccatgcatcagaccttgctctgcaatatgtcccgtgcttctgatttgctgacagaacaccacatggaaagaaacctaaattttcagaagtggagatatgtctacttcctcctcatgtggcattgggtcaagggttggcaacaaactgacttcaagctcaatcttgactattctgataactttttgacaccctgaattcagaaggccactctctgatggcttacttacacactcatgtctcaaatatttaacattccttgtatcatttctggctttataatgtgttccctgtttttcaaatttagagttttgtcttttgaaaaaaaaaactttctatagttaatattgcaaagcactcaacaccttaagaaataccttgagtgtctatttagatcatttactgataatgttttctgccaaaagaaggtaactaatatttaatatgtattcagacaggaagaggaaataatgcaagaaatcatgtagtgcacagaattaatagatgatatctaaaattgcatactcaaattctgtcactttcattcatctgcagacttaatgtttaactagttctcatggtaggccactctgagaaagttctcatagtgaaagagcaccaccaacaatgatgtctcaattgtaccactgaaagtacatcaaaatttttcttcctcatttctccaacttctcttactaccacaattaatcaagtcaccaatagtaagccatatttggttcctagagttatgttaatagattatcctctggctgactcctagtaacatctcttctcaagcatacaccattatagaattggatttgtgaaagtgcattactacagcttaatttacatatatcctgtaaaccaacaacaaaaacacctgcatgtgttcaatcacaatgagaatacctatctatgttggagctattggcaaagtccaagcagaaataatgcaaatgcccagctacaatagggtagatacattgtcctgtcttcacacagtggagtactttacagtggtgggaaggagtaagtacgactacaatgcaacaacagacatggatctcctaagcctaacaaggaggaaaagaaccatatgcaaaacagtgcacagtagtgatcctatctagaaagaacaaaaggagtaatattaaatatttgcattcccagtcagacagttgccatccttaaaaaggagtggaaacagagattagaaaaggggcttctaaaatgtttctaatattctgtttcttaatcacaatattggttggatgtatgctgttttgagaaaattaattgacttcattttctatatgtgtaatatacttcaataagagttgttaaagccccaaaaggcttgagattttaaatagctaattttgggagagattaaaatggactgtataaaatgtcacatgtgggcgagaaaagttttgagcaaggatctacattccaatcaatatggactgaaatgtctgttccaagatccatgtgggctttgaagctcataagatttcatgcctccacacacaatgctattagtttttgttgtaactgaatctttccaggccacttctggtcatgctaagaggctcttgttgcctctgaaagacatgccctggactgtggcctccaaccaaggctccttccagctagtttccaagcagtatgttactgccgaagcatcctttgacagttactttttgtctttctctcagatgttccgagatatgatccctctttgacaccttcagtttacctaacttacattcttttgtgtcaattaaaagtggagaaccagagctgagtggcatattcttttcaattcacttagctatccactcagtccagacagcttgaaaagctcacttctgtcttcaccatccttctctgcttgctgcatctactgcacagaactgattgacagatgtgggtccccaaatggccaaattacagctgcttcacaccaccagccttttccatatattccttcattgtggtaaatgatcactcagaagccttcagcagtgtttactgggagtaatatactgacaactttatatataatttgcccagatttgtccataacaagtaagtggtagcatctagaccatctagctcagaagtccaatattaaaaatagtttcagccaacttaactgtgacaagagaaaaaaattaacatgtcatttagcaagtactcaattatgtcaagaacaggatgttaagtactctcctatagaagatcttggtcagttcttacacaggcttgtcacatggatgtcatcattatcatcatcatccttttgtggatggaaaagtagagggccagagttaacatgttatcctaaaccacacattatgtgtaaagcagaacaagatctcaaaacagcaatccatgtttttgcagaagtaataaatactttgagctttacagatcaaatgaggactgtcatgcacttttctgatcctttgtttcaccattagttgactgcattttacaagcctttaaaaatgcaacatttgtcccaacctccatgacaagatctgacccaaagatagaagttgacagattactaaaagccccctgaattatgagactagaggaaaagatataataaagcacaggctaaagactggatctcaatttaaatctgagttctatcagttactatctaatatttaataaagagtttacaaagtgacaaccaaagctgcggatgtctcacatatatttacttacttcagcagctctcaaccttcctaaggctgcaatctttcaatacaattcctcatgtcatggtgacgcccccccccccccccagccataaaagtatttttgttgctatttcataactgtaattttgcaactgttatggaacttagtgaaaatatctgatacgtgagccctgagaaagggttgcttggccctcccaaaagggtcatgacccacaggctgagaaatgctgattagtcaatcttcataggaatcctgaaggatagttctgtatccattctccagataagaaaactgagatccagagtacacacaaaagtatcacaaatttgcacacagcaagaaattgatagagctgggccactgacctataaaacatactgtgatcttaaatattatgctaatagttactgaaattaataataaactgcctgatgaatttgtacatcaaaggaaattgtgctgttaccaataatccacttttctttcaaagtaattcttcctgacaggttgctgtaatagaactggaacatctaataagctacaagagactgatcccactcacctgctggtttatctgtgtgcaacataaaacccaagtggggtggctatgtactggcagaaggaaacactagatatgataacaattattcccagtaagggaactaaagttctgaattgagagtcaaaatataaacaggtaaagagctaagcaggggatgattagtaggtatccaagagaacaagtggttggggttgagatccatactcaaaatcacaaatacaagaaaacttgagatcctaagtctgccctaggaaaacaggagggctgagggctgggctgcagtcattgcatgagtaagagtgagtctaaggcttggatcttcaccatgtgaaagggaggttcatcttcaaggtagtggggagtcaggttcatgacaggctccagagacaaaaaaaaattgagagattttttaatcatatgagccttacacaaattctttggctaacatgcgtgaaatcctgggtttgatccccagcaccgcatacatagggcatggtggtaattctggtagttagtagaggcaggaagatctagagttcacgatcacccttaactacatgagacttgcctcaaaagaaattaataaataataaaattctttaatttctaaaagggcaaaattggtattaatagtcttatgcgattaaccatggataagaaacatgaaagtttaaaaaaagaagacttctgagaaccactgaggaagccgtccttttgccctgaaacaatttttttgttcccctcttctttgcagtctttgtaagctcaattcttccatactgttcagctttgtctcactcccacaatctttccttgtccttccagcctgcctgcttatgtttgttttactcactagtctgtaagtttcagccaatctgttaagctcatcatagaatcttcagggtgctcagcatcaatttaatgattaccctctatgaataaatttctataatcagggtattaaaatacctaagtattattttcactaccagactggccaaaatctctctgaagctgaaaaatatgtactaccagttatctggcagtcttcagtaacaataccaggaaaatcacaagacatgggataaatagagtatcatcatgttatttatacccaaatatgctacaaggtctccaggacagaaaagggactatataaataacaaaaaaagttttactggtaaacaaatagctagaattcttatgcctttcacacagtaaacactatgctttttttttcctactgatgaaaaactttaccagagccatcagtcctgtttctccctatctattttctgactgcagatgactataatttactaagtcacctacctggctggcatcactggagttgctcagtatccacagtgcctgtcgctactcaaagagcaaaggcatctttggcatttgaaatgaacaaaaattaatcaatagagaaaaagaacaaattaatttgaagttatgtaatcttataccctgaaaagaacctgattaaatcgccttcctttgcagctgtttctaatctgggacagtgcaggtgtttacaatcttttgtaagttgacctccagtgacccaaggataaaaattttaattgcttatcaaatgtaattttatggacgagataaagatactgtgaatgcatataaactcctctgaaatacagagtctttcaaaatgggattttagttagctcactactctttctttagagttaattgattttcttgacatctttttagcctggcaaactgcctgcctaagtactttatctgaccttcaggctgtttgccaagtattgatcctgtacctacaatggctgtgtcgcacccgctcctccaactttgataagagctaatgtactatgccggcagacaggaattcaatggtcacaacatttttctcagcctcttctatcttcttttcttcttatacaataatttgggctctatcaaaatctgatcttcaacaaatcagatagacatttaaacctaatttttcttctagaaacttttggtgtatttcttaagtcaacttctataggcaacaataaataatgtttacaaatatttgattccatagtggagttaatattagtattacttgatagttttttaaaagtaaagctaagacttatagagatgcttgggaaatatttggagaaaatacatggtgtaaagggaagagataaagttagcaaagagtattgaaatcatgccctcaatataatagccaaagaagataatattttcttgtcctcctacagtttagcttataaatggatggattacacacacacacagagagagagagagacagagagacagagagatggggagggaagaggaaaaggagagcaagaggaaaaggaaacagagagagagaggaaagggagacagagggaggaggagagataagaaagggagagatagtttgttcccaacccaaagacaatagttcatactttaataaagaattcacataattcttctatgtatagcactgtaagccatttacaggcttatagtgtatttgggagcagaatcatgctaggcttctgggataactgtgcgtagaattagtgtaatcatgatgaattttagacttgtggttatttgacattaaattctaggagttttactgaacccaaatagctctggactagcaaagatgtgctatgaaaggaaaccctattctccagcccaggatggagtctttgtatatgatgaaggatctaaaagcagaatcaccaaaacaagtcccttggggaacacagagccttgttctggtgtatttgatgtactgaggttaatgtgaggtaagactgactgatgctctagtatagagcagctatcattaatgtttgcactggaacatctaactttaaaaacaaaaacaaaaatcaggaaacagaagaaactaaagacattacatctggaacaaaatgatactaagagatatctggtttgaattctttctaaagagagagagagagagagagagagagagagagagagagagattccaacccaaaagcaatgcacactcagcacattcttctatgtatgccacctacacattctccatgatgaaggaactggttagaaccttagtggacactggtctctgggtaggaaggggcaaaggatcccttaaggctggccaatgcagagaagatacagagggttctacagagctggttgttggaggaagacatattgagggtgtcttgagactagtgtacataaatccatggaagcagagctgagggaaaaagtgcttggattattttaatatcatactcattctaatgaagatctatgaagctttaggataattcaattatataaagtcagttaggttcagatagagggtacacggtgttggccagtaagagggagaagaggaacatctaagaaaaggagcaataataatgaaaaaaacttaagagagatacacaggagaaagtcccaatgtggacagcacaaacatgtggcccaggaaacttcagcaaatccatgacttcttgggacttacattttgaataaagaaggactgagtgatatgtgataactgttccagattgttctgtgaattatcagctaaatcagtactgctcttacaattacaatggtgtttgtctccagtaactggaagcaaagaaccttgaaaacaaaggggaggaaatgaactgaaatgtgacatttgaaaaaagagagggggggggagttgggtaaatatgccttggggaataaagattacaacatagtaaattttctgaaaatatgttttttccaggaggtccaagaagtgtggccaacagcctaggaatgtgtgtgtgtggcagaagaccaaatgctattgcagcaagccatgtggatcctggggatgaacacatacttcatttacctcttccacaaagggtgggaaggatcaggtatgtggtaaaatttgtgggtttgcaacctttgaaaacaagagataaacaaagaaagtagttcagtcaatcttggtaagcaaaattgatagagttctctataactctgtcaatcaatcaatcggcaaatcacaataaataaagagaaagaaataatgtgggagttatacaacaaaaatgagaatagagcttgaagtgtggtctgtatgaagctcctctctaggaagaccagcagaaatcacattgcctattttgtccttagttttcatgataggactgatttggagactgtagcctcgtttagatgtctttgatacagtctgaattttactgattcgaaccatcctcacattcccagaaggtctgctgctcataccatgtacatctctcttcttataaactgaaggggcaaagatgacagaaagctgccagcagttccgaagctcattcactcccaggaggtttatttcctctgagaagaaagagaccagatgagttatcacagaagcactcagcagctctgctggtgtccagttctaagttctcactaatgagatgtctcttattaaagagagctcaaccacacgggaaaggagagggcattacatgcaaagtccccacctacatgaactacagctaacatggaagtgagggagttgcatgatacaaaagaaaatatgaaccagatagtaaaacttctcagtccacaggagaccagtctccagcaaaatcaggagaggaggcacaaatgaaatgtgaaggaagccagagataagagttgacaatcaatcatacctactgccctccttgagcagatcccacaactttctacaattctgtgaacagcagtcatgcctggctattgctaaccactagagacaccatgcccgctcagccatgctttggttctctgtgttctccatgccattcatgcagcctgcgggccattctagaccctaaactcctgccaggtgtcctgtcaggaaaagatggtttattctaggtcatgctggcggctgagcccaagagcctgctgcctgtgctgtgtagaccttgccaagttgagctgcatctagttttttttttttttttttcttcaatcattcctagaaatatcaattctggaaaactgttttcccacataaggttttggcagccagtcctcagcagttacctcattctttcctctgctgccatctgagagagtatgcaggaaaaacagtgcacctgtaggcagactggctgcacagagggtgaaggattggatacactctccatcctgacaggatcctagggggcagggacagacttcatggagttaaagactgttagtactgccagacacctgagacttcacctagcccaaatccaccactccacttgctgggaaactgggctgaaggaagtctcctctgcaggttatacttaaacgtatttgcaaatggatgaactgaatgaacagctaatgaactaggaggaggacagggtaagtgcatttgtggagcatgaagtgggatcatagcaagaagagatctttggcactgtttacctcaacctgttcaagtggcaataacagggtaccacagaccaaggaatttgtaaacaatagaaatgaatctcctacaggtttggaaaccgggatttgcaagatcaagacatcagcaggttctatggctgcttcgaatctgtttcctggttcgtggacaggtattttctggctgcatcctcaaaagatagaagaaaaagagaattctctgggttcttttattttataaaggcaggaacccactcatgagaaccctaaccctctttatcaagatccctactttctaatagaatcacaattgggaatgggtttcatcacatgaatttgaggtagaaacaaggaattctgtatatagcgctaagtagatgcacattcctcttctgttcttggggcaaatcatagccactggtcatcagactttatttttggtccaggcagcatcttctgaaaataagctgttcatgactcttctatattattgacaatgaatcataaagggagagttagagcaagtcttgggaagcatatggtcatatcctcatattttagacacgagagactaagatttgaaaaaaaaactgaaacagctttcccagaatatccaatcagcatgggatggtcacagaaaggaaaagtaataggcagcccctgagctaactgtccttgaccattctttttcctacagaaactaatctaaaacatgtgcgcacacatacgcccatgtgtccttacctactgcaggtatagagttgctaaatatactacttcaacagctgggattttacaagttgactttctacaaggtgtttgtgagtttcttaaaatgtgttacgccctttttttcctcagaggtatcttcatatatatatatatatatatatatatatatatatacacacatatatacannnnnnnnnnnnnnnnnnnnnnnnnnnnnnnnnnnnnnnnnnnnnagattactttataccaggaacctcaaaacctggacagtaaattcaagctttagtcagtgtgaataatcattttgaaaaaaaaaatccagacaagatcatcagagtgcatcagccacttagaagtccagctgatgatgcttccatgagcatctactgacacacctgattagggaattttcctcaaagtcaatgagacctaataatggagtcaggccaggatgaacttgggaagctgctgtgcacttaaatccctgaatgaatgagtgatttagctcagtgaatgagtgatttagctcagtgaatgaactcacccaggtgatcacaaaccttctaagaacgcaaaggagtgtcctggagatgttcatcttttcatgcaaagccccatcactttcttctgtgtccccacagctcatcagcagcacaactatgtactgaagaggaatatgctaggaactgagttgaaatttctacctagtcgagaaactaagtagaaaccttctccaagtcatgacaaccaaagagagagagagagagagagagagagagagagagagagagagagagacgagagccaggaaggtatacaaaagactaaataattatatacctggcataatggcatcaagtaagctggtgaagcaataaacaattatgaagttaatagaatggcggtgtggcacattacagtgaattagaaggccctttcccttcttaatgggaccgctttctacatttgaatcttgtgcatcattatttagggtagattgatcatctactctgattataataaggaaggaagggaaaaatagaaaaatctggcacacagagaaggaatctgaattcctatggcagtgtggtggtttgaaagaaaatattgccaaaaggagtggcaatatttggggttgtggcctttttggaggaagcgtgtcactgtgggtggtgggctttgaggtctcttttgctcaagcttagctcagcatgacagtcagttaacttccggttgcctcccagatacagcactctgagctccagcaccatgtctccctgaatgccaccatgttccccaccatgatgataatggactgaacctggaaattgtaagggagtcaccccaaataaatgttttctttataagagtcgccatgctcatgtctcttcacagaaataaaacccaaactatgacaggtaggtacttagtgagctgaacccaaagaattaaatcccaagtgaaagttaagaatgggtggccaggatctgatccttagatgaatcccaggaatgtcatttgcaaactaagtggagtccattgggacaatgcacaaagaagttcagaagaacatagcaacactccagggagcagcacacagctttccaataaggtattatagatgtcaggactagagatctaggcagagtgtgtagataactaggtaaataagtctaaaggaataaatctcaaggggatgttatctaggggtgttatgtcacaagggctaaagggatggaagagattagagttgggtggtaccaggcacagcaggggagtctgataattttcagcccagatggtccaggtgctggaggaggatccatcacagcttactctttacctgcatttgttcccccatatagttgagatgttgcctcctacttcaaaatggaaaaaaatagtgtggggatcttatttgcagtaagtgtgtaagagtcctgttgctttgtgatctgtagctacacctgagaacatggtccatcttgaagagatgatattaatgaagggcaacaatataggattgccatgggcataacccagaatacttctgagaaagaaataagaatgaaatagcaccacaactcaaatcctacattgaaacaggatctattttctttttcaaagaaaaggaaataactacttctagagttcttggaggaagatttagcaataactgagtaataaattcttgagctaatataccatgtctggaatttcgataactcaatccccatgagcctcaattaataaagattagaccttgcttggcatgtataggggattctttttcttttaataactaactgtatctctggattatatagtttctcaaaataactatcctagaagcaagataaaaagccactgaaataaacaaggagaacatggggatggaagaatttcatgccgcttcctttcacccttaaactaaaatatgtttcatgtataagtgtgctttcccagtgttcagtggagcaaaattcctgtggctacttggcccctgtttgcactggcaggccctggaggcagcctgtgaaagggaagaagcagatgcagctgaccaggctgcattccagggcagcttcactcgttcattaagctgtgatcattaatagctgataattattgagttaagtaaagttattgcccccattttgtagatgaaaaaaactacagtgtgagtttggcagcttggccaagactacagtaagtggtgaagactttgtggtctaataaccatcatgtctcttaatcttcatggtacatgtcttgctctctcttggagttagtaagtggccaactcagcttagataggactcaatttttccaccaacaaacaaaaagtatgctaacaaattttgtaaatctgatggggaaaccagatgatataatacatgtttagactgcagctggtaatcaatcattaaataaacagtagccatacttgataggtaattgtttttatgatggctaagttttcactgacatatctttctttgagtcataatgctacagttctggcattacaaagaaagatattagtgccagattttcatttacaagaaaattacaattcccatttaatttccttccctgttttgagagcaaagccagggtcaaattctttaaagataaccagtaaggtttatcttagatccagagctatttaggaaaaggttacatgaatcttgacttccacctgattaccaaaatagtcaaactattagcttatattgaccatgacacagcgtattactcaaaggtagtatggagctactagcacatatgagctggctatttcctgggaacattattgtctccagagctaaaataattgccaacccttgcaaattatacctcttcctttccttcttccttgctaagaaatgagagtttatcaggaggtcacaaccaggaaacttcacagagagaagaactcttcctagccttaggtaccaactcatgtttgatttgagtgaatgatggtattctcttttccattattagttacttgtttaataacaaactgcattgggtcactccataggaagcctcagggaggaaggcttatggaagaagtcttttactctcaaaaaatagacattccagaaagaacatatttcttgccttcccttataatgtttgaaccaaatgttggtgggggatgtccttctgtatgttgtgaagatgtttttggttaattggttgatgaataaatctatttaggccaatggacaggcaggacagagccaggcaggaagtataggcaggacttccagactaggagaatgctgagaagaggaacacagagtgaatggtgagcaagacaccatgtacctgctgaaaaagcaagaggcttaggcatcaccagtaatccaagactacgtggagatacatagaaatggattaataattaagagagatagccaagaagcctaagcattcggcaaaacagtttataattaatataagcctctgtgtgtttatttgggactaaacagctgcaggacccagcacaacagaaacttccatttacaaaaggtatctaattagacttgatgagctgtaagatgatgaatctgcatatcagtaatcacaaacaataaatcaatactagtaaagctgaggacagtgctagacacccagatcccagcacttgtaggtgataggaaaagaaaggaccagaagtccaaagtgattctttgcttatgtggagtttggggcaaagctggactacaagagaccttgtgaaaaacaaaagaagggggtgggaagaagccaaggggaaaagagaaatcaacaagagcaaaagaatgtggaaaacagtccttaaggaacctctaaaggtaatgattaaccttaatgtacctaacaagaagtcctgtagacttgccagggaactccttcgttgatttagtcattgcttatgccatttgaagttcagtggtctattatttattattgtcatgaggggagatgcacatgtgtgtcatgactcatgtggaggtcagaggacagttttcaggagtcagtcctttccttcctctgtgagttcaggccctcaaactcaggttgtcatgcttgatacatgtcttctataggctgagacatcttgctggccttgtatcttcactgatatccaaaccaaggaatctaggtcttggcctaagcttaaggaacccaagttaacagacaaatcccagcgtactgttcctgtgactcctaccacaagcatatactaaagagccctcaggaaagaaaagtgatgtgagagtgaaaaaggccttggaggaatctgccagctccgacagtctttgagattcaggtacttcttcacatgctcattccactcaacttgactagctaacagaccacatcattcatctccctctaaatattacagaaagttgcaactaaactttaggttcagtatcagtgcctggaaaattgctccagaacgaacatatctacccccaagttgcatattttctgaaatttgccatcacactctttatatgttactataagatatgatgcctacctgatggtcattaagcttttgtagaactggtgagacaaagaaagcaaatcagtcctacagcaatgggggtgaatgggcttcacatgagctgctgagtgtatgtctccagccatgctaagcatcagcgtgaagaattgttgcctgagtggagaccatggagaaagacaagaccttttttagagccactacatgaaaataatggcaaataaaagactgacagcaagggcctcggtcttttaaagaggggactggacagttgctgtgagcacctgttccattcactgctgaaatgcagtgggattatatctggaaacaaaattccctaacagcacagtttgtgaaaaataaaacatactgtgaaaaaggacagtataaaaatctcccctcaattcttcttgagtatttttaaactacatatgtaaaagttgagatttatctgtaattttatacatgtgcatccacatacatatatagacagatagatgatgaagagaaggtgtgtattatctgttcagataatacacacctcaaaatggaagggataatctttaaatactgtgccgcatagacagagataagttgctctccaggcttgtggaatctgtgctatgctatatcgaatagacatgctccactctgtctcatcaatgactattgtcatcatgaattattcttgcgctgattagtcagttcctttcttcagaggcttgactaaagaactccccctgcaatttcaattgcactccttctttaccactgcgactcatatcctctttgtttcaccgggtctccaatttcatcctttccccctctcttcataatccatcattctctgtgagacactgctggctgagcactgcacaataggccttgtctcaccctatttaccatgcccattaaatctattagtctcagtacaccatcagcttttaaaagtgcccctttcatgggcccccttcttacctgttctaatgacattgttctctctcccagtgccctttgaacactcatgtcattaagctccgatttcactttgcttctgataatgacaagatggccgccctatctaatcttactctggagcctaacagaaggaccttcacagaagtggccacaagagatacctattgattgttccccttgcctctcctttcctcaaggtcccagagctgctgtttgtgtgattctttttcctatcgttgagtggccagatccccagagcaagacccaggtcatttgtgcacagcctcatctagctcacattgactgtttttagtgagtcactcccatggcataagagttggtgaatgacttccagcttttcccttttcctcgttcctcctactaaacattctgttcagatgtttaactccattttattccatcaaatatttactatctgagtgtattttatctgtcaggttctgaactaggtgttagggagacaagataaatgagatttagtcgttctccaaggatagtcctacctgggtactgaagggaaagattgatggagcaaccaatggctatagctgagacacaatggcctaagctctgccagggtcacagggaatctaatcacaccaacttctgttttgttgctgcactaagagcaagaagtatgtgaatagccaagtctagacagactatgccagtacaaggatgaaacttagtttaaaacctggatcagactccctcagcctagacacatgggggaaggcctagtccctatgccaaaggctatgacagactctgaaggccccacatggaaggcctcactctccctggggagcagaaatgttattggataggtaaggtgttagtgggggacaggggaggagtggaggagagggaatggggattgacatgtaaaacaatcttgtttctaatttaaattaaaaaattaagaaatattgccacattaaaaaatttaattttaaaatttaaaaagaaattggatcagttaccatttagaaaaccctaaaacaagcctcccacaagtcaaggacctagctggcctcagctagctggttaccaacagtagcactaattgccaagggctttcctgaggttgaaacagaacagcatttggagattcctagctacacacctgacatacatgttcactagtaatgcatagatctaagaaatcttatttttaaaaacttagtgacagtccatgaaacagtttcccctagtaatatacaactcatttttggagtttttgtttttgttttgttttttactaaaagggtgttggagttaacacatgtgccagaatagcttcgactcctcctaggtgaaggtagcaaaattaagtcatcactaacatctacctctgagacatggtgcctatcagaatcgaggtgcagagaactagaagctctccgggaaacacatgccgtgcagtagagctggatttattgccattgacagctgctctctagggggtcagaatttgaaccactagagtattccaggtcaggaatctgccacattaatagactttccatagaggtctccctgagtagcaaaggcttgaactcacctcctgccatatttcattgtgacagagagccctactctcacccgagggaaggcactctcacagaaaaataaatgtcctccacttagtgccatcctaatgactatatatcatcaatagcaggacagtgcaaaatgcttattgggccatgcacaccccaccctagcatttttaattataaatcacaaaagaaaacatagaatttctttgttttgcctgcattcaagataatcttatcgggattgtcagcaaagaataatagtatagtcaaaagaatattcaatgccccttcaggctcttttcagaattcagggtgttggcacatatttttaaaaccaaatttaaaaaaaaaacctacataatttagctcaggtgctaatttagcataagctgagagaaagaatgagtcaggaaaacgttttcccagaatgcagcttagcctttcaccccaactttctgagctcttgtcaatgcactgaaactggtgttgatgttaaaatcatctgacaacttgtaactcagctataagcagtgcaacataagctacaagtgtctatttatacacacaagcaacaatttccccaggagcctacctatcctgcctttcagcgactcctctgtcatcctgagagctataccctcctatggatgttagtctcttgttggacgccttaagttgccttccagttcctaataacctcaaggaggtgcctaccacagcttccaggctcaaacctctgtggagtatccattttaatactcagcattatcaccgactaatgtggagagagcgattgcatctgtgcctgtcaggaaaatgatagtcctggtattcactggcctcccaggaaaccaggctgccaggacaccggaagtggggaaagaggctctaactgatggactgtcagacatacaaaagggatgtggctttttcctgtgttctgttcttggcatcaattacatcatttgctcaagtcccatcatcaaccaatttgatatacacagctgaagcatcttataaacttaaagtaattacagcaaatagcattgacacacaactcaacacagtgttaacacaacagcaatgcaaggcaacataagcacaatgcccagctctggatcaaagctttcttattttaggaaataccacagttacacatttgctcaaaaatggtttttggaatcactgactcttttggcttgactagaataataaacctatggagtactataaagctatgttttaaacaaatgtctaaatgcaaaatgagagccacaattcatcagttacatgactgtcataaataacttctatgcaccaatgtccagttagagaagtacaaagaaaacattcacttaaaaggatagttgtgactttgtaataacatcatggatatagaacatgtagtatagctctcctggtaaagagcattcaataaaaaatacagtgtagcgtttgaataccaggcaatacactaattgtttttaaatgaatttttatttaaataaaaagccatcttattttttgtcttttatttttataaaaaaaagctatgtttttgtataagtgggtggggtttccacagagaaatgtgctgacaggtactttgcctgcccacattctgcagaatgaagaggaccaacagtaaagctcttctgacttccacaaagaacaaaaggtccgctaaaagtaagaggcaaacagaaaataagaaaagacaaagagagaaattattcagatgaaaaggggaatatgatcttgcaggaattgacctttgtcataaaagaaaaatcaatgtttaactttgttggtggtgaagtttatagcaaagtgccatcaattcaagacttattttcaaaggccaataattgattgtcactgtttcatttccagctccctcttcaaccatctcatcctttcttttcattgatagtttcaaaaaacaataaccagtttcagtaagaagtgttacaaaattgagattttttaatgaaaataaacataaaaatagctgtctctgatttaaatcataagtaattatttcttccttaagctacctataagaccttctaactctaagttcctcccacactgagttcattttcacctggtaatttaggaataacttcttctttatagtttttttcaggtcttattatttccatggaaatacccatatatcacagaattgatgggtttgtttcagaaaggttgtctaacctttaattccccaaagcatatctctcttgcttaaattttcgagggtgtgctgacttctgttatagaaatgaggtgggaaaggcaatgcattgctgcaaaacgtgagttgatggctgggacctctgttcaaagtaagcctgtcacgtcagtcttcctgagattcagggtttacatcatgaaatcagcaacattccagaactgagatctgtcatcttccctctggcttttccccatgattctttacaagggtaccacagcatgtccagggaagagatgagagtctgggaaaatgttgagaacattccattatctgttccaataatcattttcacaaagacaggggaacagttcatgagaaagtaatgtgtgcccattcatttgtctatatttctggacagagtcttgctaaatttatattccaggcttgcttcaaattctggatctatcttcctgaacctcccaagtgctgggattacagatgtgcagactctgtgtaagggaaatgggactctaaacattgttatatacttgatacttgagctgaggagcccatctttattttcatcggaccataacagaactctcctttctgtctgtgctactggtgttgtattcaggaagttttctcctgtgccaatgcattcaaagctacttcccactttctcttctaagaagttcagtgtaactggatttatgttgaggtccttaagccacttggatttgagtttgtgcagattgatagatatgaatcttgaaaaaaaagtcatcctgagtgaggtaacccagacccagaaagacaaacatggtacgtactcactcataattgggcattagctgtaaaggataaccaggctaaaatccacagcctcagagaaactagataacaaggaaggcccaaaatggatgcctggatttcctgggcaggagaaatagaagtgatctcctgggtagactaggtgtgggtggggatgggaatattagggatgaggttggaggaggtgtgtggtcggaggaggagaatactaaaagaggtgtcttgatacagggggcattttggggtcaggtagaaacctggctcaaagtaaactcccacgaatctacaaagataaccccagctgctaagattcctataatagtggatataactgaccatctcctgtaactggattgctgacgaccccaattgtcatcaaagagccttcatccattaattgatagaaacagaggtaaaaacccacagccaagcactagaacaagcttggggaatactgttgaagaggaggaaggattgtatgaaccaggtatgtgttggggggtgtcaaggtcaatacaagggaatacacagaaacagctaacctgggctcataggaatttacagagtctggactgacagctagagagcctactttggattgatgtaggccctctacgtatgtatgacagttgtgcagtttgtactacttgggggactcctagcagtggaagcagtgcctgtccctaatgccttggctgttcttgggttgccttgcccagccttaatacttgatatgccatggtttgttgacactcatgggagttctgcccctttctgaacagaaacaggagtagattggagggacacggggcaggtgtggaaagagaattgaagaagtgggaggggaaactgaggtcgggatgtataataaatgaataaatttaataaaaagtttgtaataagaacctctttttatgtttatgcattaaattatacttttacttttatgtttttatttttgtacatatatatcctttcttgctcactgtaatggcatagtagggggtgcctgaatttccatttctttagttttttaacatttcattttcagcctgatcactaatttaaagttttgtcactaagtccaaggtgagatggcacttcctgggcccttgtaaataggctgagacatgcatttaattttgctaatggtatgtaagcaaagataatatccattgctttggggcaatatacattggaaggcatttttttttcttagaaagaaaattattttacatgttaatcccaggtccctctccttcccctcctcccctgtacccaccccccaattaacgccctacctatcccataccctttctgctccctagggatggtaaggccttccatagggcgtcttcaaagtctgtcatattctttgggatagggcctaggccaagcaccttgtgtctaggctcagggaatatccctccatgtgggatgggctcctaaagtccattcctatggtagcgataagtattgatattctacaagaggccccatagatttccaaggtcttctcactgacacccacattcaggggttttgatcagtgccatactggtttccccagtctgggaccaagagctctcccttgttcaggtcagctgtttctgtggttttcaccagcctggtaaggattcctttgctcatcagtcctccttgtctgcatctggatttcagttcagttcaaggtttagctgtgggtgtctgcttctacttccaccagctgctggatgaaggatggcatatgaattagtcatcaatctcattatcaggagagggcatttaaggtaacctctcctctgttgcttagattgttagttggtgttatctttgtagctctccagacatttccctggtgcctgatttctctttgaaattacaatttctccctctattatattatctcttatcttgctttcttctgttcgtcccccaactcaacctccctgccccatcatgtcttcctcacccttcttcttctccccttctcattctcctagttccctctctcctccccccatgctcccaatttgctcaggagatcttgtccctttcaccttctccaggggaccatgtatgtcctccttgtttaccagcctctccggcagcatggactgtcggctgataatcctttactctatgtctaaaaatccacatatgagtgagtaaatacaatgtctgctttttgtgactgggttacctcacacagaatggtttcttctagttccatccatttgcctgcaaatttcaagattccattgctttttttcctactgaatagtactccattgtgtaaatgtaccacattttctctatccattcttcagttgaggggcatctaggttgtttccaggttctggctattacaaataatgctgctgtgaacatagttgtacagatgtccttgttgtaggaatgtgcttcttttgggtatatgcctaagagtggaattgctgcatcttgtggtagattgattcccattttcctgaggaatcgccatacagatttccaaagtggctgtactagttggcactcccaccagcagtagaggagtgttcccctttctccacaacctctccaacataaactgtcaatggtgtttttgattttagccattctgacaggtgtaagatggtatctcagagttgttttgatttgcatttccctgatggctaaggatgttgaacacttccttatgtgtctttcagccattttagattcctctattgagaattgtctatttagttctgtaccccacttattaattggattatttggtgttttggagactagcttttagagctctttgtaaattttggagatcagccctctgtcggatgtggggttggtgaatatattttcccaatccctgggctgtcgttttgtcttgttgacaatgtcctttgccttacagaagcttcttggtttcaggaggtctcatttattaattgtggatctcagtgcctgtgctactggtgttatgtttaggaagtagtctcctgtaccaatttgttcaagggtatttcctactatctcttttaataagttcaatgtggctggatttatgttgaggtctttgatccctttggacttaatttttgggtatgtcgatagacatggttctatctgcagccttctaacatgccagcatccagttatgccagcaccatttgttgaagatactttctttattccactgtatagctttggcttctttgtcaaaattcaggcattcataggtgttcaggttcatatcagggttttcaactctattccattggtctacctgtctatttttgtgccaataccaagctgttttcaggacaatagcactataatagagcttgaaatcaaggattgtgatgcccccagaagttctattattgtacagtgttgttttggctatcctgggtcttttgtttttccatataaagttgagaattgttttttcaaggtctgtgaagaactgttctgggattttgatagggattgaattgaatctgtagattgcttttggcaagattgacatttttactatgttgatcctacctatccaagagcatggaggttggaaggcagtttttaaagacttccttcttcctataattgtgattagaaaaatctgcaaatagagatttcatcagactggttccaaacagaaacctcaaaccagacacaccacagtgagaagacacaagagtcttgcttggggacattaagacttagaggctcttattgcaccaaaatgtagtcttaaacctatctgatgcaagttcttgctggttatggttaatttcaggctgccagatactgttttgtattttgtatttttcaaaacataaaaatctttaatgctaagcaaacaaataaatgagtctttcagagacctgttagaaggacacaggatagctttctcctgggagcatagtttaccagttacagcattatctcagtagacttctctccatattggtcacatactggttcaatgttggttagaaatatagagaaatattttgtcctcatcacaaacatatttaaagaattactattagtggataacttgtacaagtatatagcagctgtatatttcccagaaataaatatcagcaaaacagaattattattgtcatgattattttatcatcttcaatatcctgcagctgagcaactcataaataaaatttagccagttcatagcaagtgtataaagccaacactcccatgaagttgagtctgtagaaatacatttatctagaagtatttttacatccatttttttgagctgaggaatggaactaaatatacatgatgtctgtatttttttaaaaaatgttgcctagtctttccagaacaaagtctcatccagctgttggcatcatcaatgtaataacataatcactaattccaactccactccatcccttgtgttctggaaatatcctggcaaggttttaatatgttgtttcttaatctggcacaaatcctctcctaaacttgatgttcagcccaattgaagaaaagtcaagaacaaaaatgttttcattcttcaatctagatgagtggacaacggagaatgtggattagacttagcttgctcaatttccacttgtgcagacaaggacagatccaagcaaaggaaacatggtggtgttccctcggctgacaatattgagccatataataagcacatgaatgctatcctcagaatagacagcctattatcatcacacatgaatgccagaatgaagcaaaaataaaagtaatttgcattgtttcttaaacatcagttttcctttgtttatgaaaaaggctcaaaggacttctcttttcatcatttctatttctcacatagcttttataagtcatttgtcataagaaagcaactgtacccataagtttttttcatttcatcatcatcattacttaaatcaaaatatcttcagtaaaaacaggcacacacagcaatgttatttatacaactgtgtaccttccttcaacagagcactgcacctggaactcacagattagtaaatctcaagaaggtggtttggctttgctattttccccccttaaataattaatcttgaattcactggaagacaaattatatgaatttgagagacagacaaagagacgtggtaattgctttattgaccaggctggcctcaaactcacagtgatcttcctgcctcagtctccctagtgctagaattacaggcatgcacaacctttcccaggagcaagataaagatatattctcatttaaagctacttaattcacttttcttgtttgtttatttttggaacagcatctctttgtgtacccagtgctggctttgaactaataattctcctgctttagattccagatgtgtatcgctatgtggctctgtagcgattcacacatttccaattgttttcagccttctagtggagcaatttcacatgtggtactattttgtttttgtgatgaattttataaagaaagctaataattcctataatgctacatatcattatagaaaattgatcctctcttttaagtgggagtcctttctgtgcttcaagattgggtattctgtatcaatatagatgacagagatatggaaaaggttagggctgaatgtgtaaaagttaccttcttcaaactacatatgtctatccttacttaagattacagaatactctgtggtctggagaactcctttcatgattccaagattctatcttttagcagattgggaaacttcttgaatgtgtttgtgtttgttttctttttttttccttttattggaaacagctttttttctcacataatatatgctgattataatttctcctcctctcccatcttgctccacctcccttttgtctctccttagaaaataaacaggcttctataggataataataccataaaatgagataaaacaaaaactaatacatcaaaataggataaaacaaacaaaggaatagagcccaagaaaatgtatgtgaaactattagatctgcagagtcccacttgctagtacactcaggaatcccataaaaacactaaactggaatccattatatatacagaaggacctatagggtaaaaagaaagaaaaactatatacatatataataaaaaataagaattaagaataagataaattaggaggaaaaagacctaacacaacactatgaaacatgaagccatcaaaaatgacatggcattcgttttctgttggccatctacagctggcatgcagcctacccttaagatgagcttattttcccggaaagagaaagttaaattttcatttgcaaatggtcctcaattagagagagcttttgggttagggagtccaggtttgtgtccacttttttcagctctaggatcccatctcatgcaaacctgtgcaggctctatgtatgctgcctcattctgtgtgagttcctgtgttgagttccttctgttgatttagaggacgttgttttcttggtgtcctccatctcctctggcacttatactttatcaacctcttcttccacaggataccatgatccctgagaagaaggatttggtggagagatcccatttaagggagagagccctctcactctctacataatgtctagccatggttctatgtgtgtgttgcaggaggaattttctctgatgttggctgaggaaggccatcatctatgagtatgagtatatagtaggatgtcattaggagtaattttattgctccttgtttttctcttctttactttctttctttctttgtagaatagtagtatttggtcttatgataggtccctaaccttctagtctagaagcagtattgggtatgggttctgtcttgtggagcattgattggttactcccacaaactttgtgccaccattgccataacatatcttgcaggcagtataccattgtagatcaaaggctttgtggctaggttggtgtttatgtttttcctttggtaacatgaagagtaccttcctttaccaaagacacataggggtgaatgctctatgtaggcaccagctcgacttctccatgttcagttaattatgcaggtggtgtcttcagcaatagggctttgaatgtgtttgtgtttgtaacatttgaacattggattatttccttctttcttctaaaaattatgtgaagtgagaaaactcagaataatttagagatccaataggctgaattcaccattggagctctaacagcagggcgagcctggctcctttgtctacacagacaaacatgcctgctttgtctttcatcgaattgaaaacatttgctttgatacctgggcctggtgagttgcctattttcaccaaacatctttgtcttgtatataactgactttgccacagcctgccagcatgaaacagaggcttctgaaccttcgcaaacacagaacggaaagcggctccattcaagaaagagattaaagcaccaggctttgcaaactaggctacagccccaaaccacaagattgtcttgatgcatatgattgggaaggactaattagaagagaggatgtcattttattttctaaccagccttctctgatctgaagccatgacgcctcctcacttgttacctagcaacccttctttgtatatgtaagattactctattcgtgtattgttattcaatttatttgcaattttaagtgtctgaattttctgtaggattatcccaccctggtgtgttggccttagtctctaaaataccaggagcaacctaggaagtgaaaagcacagccctcgtgcagccattgcccactctagcatgatactaaacaaaaaactaaggattcatcttgcttggtctgggtgattataccagaaccctccccctctacagcccctgccaactgccctctgcccaacccagaaactgcttattatcttgatggaaagaatatatgcaggactggtttcttttaactcagtggaaaaatgactatcaatttaaacattaacttgtgtccaatctaatcaagaagttaaaaacagaactcgtgtctgcacatagcagaatctttcagaaaagcatccaacgaaactgcaagatttcacctaaaccctagcaatatgtaaataagtaatcagctacatttggaagcgtaccttttaatcaggtagttcagatgcataatcacctccaaatcaatctgccattagaggccattaactcctgaatgtagaaactcggttggcggccagaattctatcagagatgtggtgctgcctcagctcttcattgttgtagaacctgggctgcacttagctgccagttctttctggtttggggagtttgtgtgattgattgatggttggttgattgattgagaggggatgttgttgatgatggtgatagggtattttgttggcatcatggttttgcttttattttctccttcaaaagagaactgtgattctctcctattactagataagaatgaggaagcttaacaaacaaggaacactcggcatttaagttattttttaaaaaaatctgttgtcacttgttgcttttaattttgcctgattggccactggagaattgtttctaacaatgaaactctaatacatccagatgaccaaatcccagcacatatggatgtaccgtaactgaaacacaatgtaatatgcactctagtgatataactggctcaaagcactgtattattccttccgaatagcccaggttaaggagtacacatccccttccatggcaatacccaaatagttcccaaatctctctgccattcttttgggagtttatccagaaaaggaatttgaatgcatttgttgtctacctcctactgtgctgattggggtggggggggtgataagggcaacaggtgggcctaagtcctaggatactgaaacagtgggatgtatggcctgccaaatttagataactcaattaaaacagcctccattcccccacaccaagttaaaaaaaaatagctgggagctgaggaaaaggaggggggcagaggtgacagcaactgcggattttcttccctgggtcattagctctgtttatatttctatagcataactgtgttacaagctagcgtggttatttttgcctttgcctcatcactcagtgcagagggcagaggtgagtggctatgaattcacacagctgctatctggaagaaggcatttggaaaatagttgagtaacaccggcctttatttctctgaaagaattattctccccctaaaccaagtttgcacccagcctccaacaaagccttcccaggtttaaaacaatttctagttcttgtgccagccggaggtatgcaaagatttctctcagcaggaagtcactcatagacatcacatgaatatttaaacaatgggaagccagcaaaaagattcgttcacactgcaggacgatagtgacttctgaaattatcacaattatcattccattattgcaaaacaaatgacctgatttattatgctcagccttgatctcttcctgatacattacacaaccggttacttagccattctacgcaaacagcgtttgcatcgactgcttcattagtgttttgattattataaatctcaggaactcaatccacagcctaggctagagtcagcgatccctcagcacctatctgtgaagaaggccatcagagaattttagagtgggatatgatgaggtagtctctggaatgctggggagctcgttagctcatctcctagctctccctgcagggcagatgcttctcacttataacctacagcagaaaagggccaccaggcctgaatcagtagaagatgccagacacaaatcctactcccaacaaagatttcagagacaaaaatttcttccttttttatttatttaagaacaaaaaaatgaagatgaaaagtcctggaggaattatagcaggtgagtcatcagtaaagtaagaaacaattctggaagccagattttcccatcatccctctttttcattcctcgtgtaccctgtaaagcagcccattaaaagagcaaatttgtttaccctcctagcgaaactcagcagagttgtcacatcccaccagtggcacagcagggcaagaaaagaattctgggtcaaaaagtggaacgacaggcttggcaaaggaagatcacgatagcatgcatgttgtaatgcaacaacccttcctcccttcctcactggaacacgattacagtctaaagtgtttgcaatgagcatgtgatgtattaatgacctcaaacgggcttgtgtgtcaatcagggtagaggctgaaaactgaaactaaatttcatgtgttgtgaaatggcttagcaaatgatctcaagatttacctgtctagcaacaactttaatcaaccatttcctcatttgggtcttactattgggagatgagtacagtgtcctcatctgttctcagtatgaatctaaaattggttgctcagtaaactgctagtgaaacttctagataaattcacctgacatctcttgccaatcccatcttgtactctagtgtgatattttaacctctataacactatgccagagtgagggagaacaagccaaaaggacgggagggtgagaggacagtgggagggggagaatggatgtagaattatcgggcctcaaaaagcagctgacctgcagaccttgtaatgttcctattacaataagcactctgatgccacagaacattagacaaaaggacaggacacaaccccagtccttaaggagacactaatactgaaaacagagatcaggaagaatggagaaaattaagcaaaagataccactatgcactgctaagttaatactcatttcttagttgcttactggagatcttcattgtcactgcacccagtaaacatgaagaaaagagataagaagctatttcaacttgtgcttagagaatcaaagtcacaccaagactcaggaaccatttagatagagattagaaacagcaattcttagccctctttcaaaaagatgccacaaagaaatataaaagaactttgtagagaatgaaaaaatacaaccatctggtgtacccttatctcactagggtagagggttgggaaggatattaagggaatggattttcctaaacacaggatagaaggatggccatcacaggaacacagctcactctgtttatagccaaagctagactggcctgccctggaaatgaacacaccatgccatgcttctttctttctatcttctgcaggtacaagtggtcatttgtctcccacaaatgatgcaaagaaataccataattagctgcagttgtctctttcattcaaacaaaattgaatgaagtgacactcagagagaacatttcttccctttgtgctggggaaaagtgcatcttcactagacagaaaataaagccaactctttttgcaattaacaatactaattggtaaaacaacttcatggtataatttttctgattagtaaattttcagagtcaacgttttttcaatgtttgattttcttactaatcattaatgattattggccagacttgggtgcatgcctttaatcccagaattcgggaggcagaagctggtcctgtccagtgtggtctacatagagagttccagtccagcctggcctgccacatactaagaacctgtctcaacgaataaataaatgttagaattgttaaggatttttacatctaaattagggtgtgccaaaaggaccatggagcaatgtataagcacaaaactttgaaactttgaaggtaaacactgggatgaatttacaaaaatcttgaaagattgatctaatttttattgtaatttttttttgtattttactataatcatctattgtctaactcagacacatatcttaccacaaaacaagttgtaattggcctttggcaccacaagtggaataaagcaaggagagattttggcaggcatcatttaacattctcctactatccttttgtaaggcattagttttatattcttgtttctttggaacacaaaggattcctttaattaagagtaaaaatattttcctgtgcactgtgtctctttcagtccatttactagtcaataatgatgctaaggaagtatttctgccatcttatatctaagtcacaataagaaacaaaagaaatacttctgcattgccttgaaccacattcccagtctcctaagctccaacttgaaagccaataaatctaattattaacacatttcctattttaagtaatatctttatttattcttggaaaacataaaaaagtatataatgtatttttcttcatgtccacctgcctacctccagctctgtgctggaccctcaacatgtctcttttccatgttcttctacttcttttaaatattatatataattaataacttactgaatccaattagtacatcagcccatatgtgcatggctacgagactaatacactggggcatgagcaatctaacagcaggtatccctgaaagaaaaatgatttttccctttctcagcaataatcaactactaagagttcttcaacttcaggtatggcccagtagcttcttgcccagtcattctgaaattttgattagcttgattttgtacaggtcacgtgaagttgctgtgagttcatatgttcagtggacatgtcatttccagaagatagcatttcactgccctcttcctcatccactggctttacgttctttctgcctcttccacaatgttccctaagcctttgaagggagggatatcaatgaccctaaggataaacactcagatcacatattcaaagcactttaaccagttataaatttgcattagaaactacccattgcagaacatacctcctctgaccaaatttgaaaacagcacaagtctatgaatacaaactgggagagaaaagacatcagtggtcttacccggtgctggaatccacatcctacagtattggcatgcctggcaagatgtttaaaggacagtgtgacaacatgaccattcaacaaaacagccagaccccctagggtctatgacctccacagatatgaatttttcctcaggtttatagtactaagcatgaaatcccttctttggatcaagcctcaaatccactcaaaaagtggttgtttacctctataatcaacatgccactattgcacaaatgggtgtatcttgcctagcatttctataatgtagtatgcaggattatgtgctaggtaaggtcattggtgtatttttaccccagcaggctatgcagcaacctccagcaatatggaagctagccatcaggtagaaagtttcttggttggttcaacattcatttctctatgtcctacaaagttttgatatctttagctatttatcttaccaattagttatagtggtcagccaaaagcaatataaatagcctctctcattctgggtactctgggttctccttgaccaatacctcgtaagtaattatctcatgcctggcactgaaatgctcatttaataacccaagtcttctgggagctgcattgtccactaatgcaaggtttaaattcccttttctatttattttaagatttatttgtttattttgtacacagtggtctgtctgcatgtatgccagaggaaggcagatgttcatgagccaccatgtggttgctagcaattgaactttcttaactgctgagccatttctccagcccttcaaactccctttttattattatattttgaaattaccttacaagcaagtgggtttccataaggcttctttatacattttttaattgacaaggagtttgctaaatctaaataacactaattatgtaaccaaatatgtgaaaaatatcaggcttgtcaatatgttgtatggattaatcattgtttcttgagtgtctacaccaataattctgaacatccaagaagatatctagaataaaaatgagagtctgatacaaatttttgtgaattagaatttgaagaaccattaaatacttagggaaaatctgaaactcttataaaggattgtgatgcccacttgaacctgaaaatcacagatacactctggccttaagcaagtatatttcaacaatatgagaagtaaatagattcacatctttccaaagttctaaataatgacagtgttgttataaaaaatagagaaacatcatttccaagggaaagaaaacagaaatgctgccagcaatgctcagatatccccaaactgaatgttttgtccacttgccactatttcttcatgcttctaaacatgtccttctggtgccctttgcaaccttggtcattcacatgactcaacagaatacatacccaccaggcctatcatctattttatagcagtactttgggtagacaatttgttcaagagtttcaccttgcaaataggttaactggcagagaataggagaacaggagaatataaaactgtcaaatagaatcatattaaattgatgagttcccagaacagaaagcccatagcactgctctgtatttcccagtcatattaaagaaaatttgaagaataaaaacctaaaacctaaaaacaaattcgatttctccaagtatatagccatgaaataataggcaagagaaagaattctacaaaaaaataacattttctgacattaccagtgtagaaaaataccaattctctagctaatttgacaagagagtacaaaatatcggagacaaagtgatccacttggttacttaagagccatagtgtatattttctttgacttggcattaggctaatttggccagcgttttatttaattaatgttcaaagaaactatgagctgtttagtattgttagctacactttacaaatgatgaaaatgaagcatcagaaagctaaaaagtttaccaaaaaaaaaaaaacctctatcattagtaatcaggaaagcagattggtcccagagtcaatgatgttaactaccaaggtctgcagcctcttacctcttaccaaaaagagaaggttgtctatggcctcttatgagagcccacttcattctctccttccaccaagttaggacattttctttcatcaaagatgatgtatctggtattacattttcttagacaacacataaaatgtatgttttcacaccaagatattactatataggacatggcttagcctaacaataacacatgttatttaagtgagaaatatcccctacaggctcgcatgtttgaacacttggtcttccattggtggtggtgtttgggaaggttctggaacatttaggaggaagtaggtcactgagatcaagctttgaggttttatggcctggctccatttactgttaacattctgtctgctttcttttgtgtagaacaaatgtggtcagctggcttcctgactgccaggctgccctcaagttcccactgccactcctcttccacaacattggacaatgccccttctggaactatattccagtataagacgtttctctccagagttgctttttttcttctgtcagagtgttctatcatagtcgcagaaaagtgagtactgtagggcaattctattaatcacaggatagtaatgcataattcaaggcagtatctcatggagattctgcccaccgacattcatggtgacaaccttcagtatagaatacttgtttcgttccaagcatctagtgcaatgtttgctttagaattcaatgctagtgtaaatctattgaattgacaaactacagaaagactgccctataaccatggtacatagggccagctgcctactcaaaagagttggtggtccaccagggctcttagatctgttttgggctccaattattaaaagtcccctaaaatgggtcattttggctaagaatgcccttttttattctagggaaaggaaaggaagccatacatgggtacacccatacatgtgacatgggtgatttaaaatagacagcgacattccacccattcatgtgtagtaatctacctttctctgtgtatgtcacataaatcagttttgataaggtggtaacctacacaggggaaagagcttcttcatggactgttcattacctaagtataccaaactgtaggcctggagcaacatagaattctggcttgcagggaggacctacaagttgggagttaaagcttgttgaaagaaaactggcatccaaactgggaaatgactttgtagtttcacagatttgtctaggggtatttctacaaaaaaaaaaaaaatctctagttaggcagattgtgtttgccaagaaagtacagaatgatttcctgttccacatgttcttgcaatgtggccttatcaattttttttgaaaggtactcctaccccccaattctggacaagcctcagactgcaaggcaagtaacaccatgttcttttcttttcttattttaaggtttagcgtgtgtgtgtgtgtgtgtgtgtgtgtgtgtgtgtgtgtgtgtatacacaagtgcttgtgaaggccaaactcatttgataccctggggctggagttccaggccaatatgcatactgggaaccaaactcaggtcctcttgaagagcaacaagcattcttatcctccaggtccactctccatctgtaacactgtgacttttaagtctaggtcacacaggagatcaaactgaaaactgctcttcttgggatagctgaacttagcaacagcctatgaggaagccagaaaggcatgtggacacagcatatgtaggttttccagctaccagacctcagctgagatcccagctgatagcctgaaccaattattatcacctatataaatgaagaagccttcaagatggctccatctccagctacactgcctccagtcataaggcatctcaagaaaaaaatccatctagatgaaggaaactcatcagccctcagaaccatgaaagatattgcatttgtcgtattattattattggccatgtatctgaggataatatgttatacagcattagtatctgaaacacccaggcttgaaccaagctcaggagtcatttgctagagaggcaagttgggctttctgaataaagaactacagcaatgcagagcctgggtggggtgggttgaatcaccgccgccaagcaactgccttctccattctgtaaattcagaatctataaacctcccctgagagcatgctgtgcctgcccagagaaaagccacctcatagacgattagaatgtaagtggataacgagccatttgaattatctgctctagttcaaacacatgctgttgccaatatgctgtggcagccagctaacatctgagcatctttaatttaaattgcatatacttaacttgaaatggcatctatactctgaaactaagaatttactgtaccatcaccagatcatgggagaaatcatctttttgggaatttcttaaatgtgcctttttactgcactctgatgtggtagcagtgtaatgcctgatggctcccaagtcaaatgtctgagagtatgagatttagctccaattccaatcgctttgttaatgcacatgccgcttcctgtctgcacacaagaatgaaatgattctcaacagcttgggtcccattcccttaaaaataccacatttgtatccgtaaccttaacaatagacacattcctgaagccaacatttaacttatctaattctacaaaagacaagcctctcaaggattaagaaaaatttaaaaacttcaaagaaagccaaaagaaaataggcttgtgatgaaaatttgaaacagcactgaaaataaaaattcaaaaattttgacaaagcatttgtagatttcaaatctaatctcggggtgaaaacaatccaagaacaatatatcctgggtgtggtagcatgttcctgtaaaatcagcactgaggaggtgagatcactagcccaggatagcctgggctacataacaagtttgagaggagaaacttgcctcaaaagaacaaaagaaaaggcaaatataccaaaaccatgtattatctattcagattgcactaactagttaaacacagtgagaaatagtcacataaaataacccatttcagccttcatcctattcctccttcctgtacttgactttacaataatctggcattccctttcctcatccccaaaataccctttctcttggaatcttacagttcaacagactcatcatttcttgtcttctaaaaagcaatgtttagagctcagaccatcagattccatgctgagctagctctcactagctcatgactttgaggactaacttgtctaccttatgtcttgtagagataataataataactactgcacacaatgacacagtggtgagtggataaaatgaccagacacaaagtaaatacttggtaaaaatgaagtaataccttcagatttcaaagtgctgagcttacacctccataccccactaacaaatgctttacatttcaggattccaatgctttaaaattgctttttttaaaccttgtcctgaaaggctaggtttctacagaggtcctagctcctgttctctctctctctttaacctgccctatcgccctcagcagcatcagtttcttccaacttgtcaatgactcttcaatactaacctttctcaagatttttatttctgtgttattatcatcctatttcactggaactcagatataactatccatgtgtccgatcccatatatcatatatcagaacctgaaaatgtgtggttcataaatgggtctttctatgtgctatgattctggaagttctgaaacaaaaagacattataactgtgaacgtaaggaaaatgaggtctgaatgccaggtggctttgctctacccatcctaatccagtctattcctttctctactctgctttctaccccagaagatcccaatgggttacactaaaggttcacaggtttcctgtcttctggcttgttttggctaatggaaatcattgggagaacattggagaaaaagaaggagacattggaactcttccttggctcctccctatgatatctgcctctgagtggttaacttcatttctcaactaagtgtcatatcttttcttacagttatactctccacacaatttcaaattctggggtaactagtctcatggcactgcactaacctgcctagacctcaaatctaattcccttgctagagctttctcatatgatcctaatttcagtaagccatctgtcttatgttagaactctggctgaaatacctgcctttttagcacattccctttccttttaaaaattgactgaagacattaaagtaagtataataaaactatgttgtaaaaaaaaagaaagaaagaaatccataatcctatcatacaatttatttgcagtatgccttaattactttcctattgccataacaaaggcaacttactgaagaaagcatttaatggggcttacagtttcagaggatgagtctataatcatcatagtggaaagcatggcaacagataagcaggcatagtgctagaacagtaactgagaccattcatcctgaccaatgagacagagaggggtgcaggggagaggtggaaagaactgataatggtgtgtgcttttcaaaccacaaagcccaccccagtgacatacctctaccaacaaggacatatctcctaatccttcctaaatatagttctaccaacttagggccaagcatccaaatatataaataagcctatggagtgtattctcattcaaaaccaccattcagtatttctgatgaatgctttgtaaatggagttcttaattggtctaaataataataacccagagtcagatatagaggaaaatgctgagagataagagagaaggaagagcaagctaaagccacctttaccttagcttcctagtggaaaaaagagtgagttcctatttcttcctccttatatcctctctctgcccagcagtctcacttcctgtttctacccagccatctcatttcctgtctgtctgtgtagacatccagacctctgttgttagctggtggcacactccatcctctggtcttcagacaggttttatttgtacaagcaaaataatcactacatgcttagttcagttataattaaaaataattcatagcatttcttgtattttcatttattattgtaaaataagcctttcaatcttgctacataatctttataaacattaacttaagacacttcataataatcttttagagtactgctgcaattttcttgatttttctcatattaatgaacatttggcatactctcttcaagtgaccttctcatgcatacattcacatataccattacacatatgttgatttttttcccatttctcaactagttttgttaaaaggcatttttcataaactcacacatattccataaaataaaattgttatttctggaatataactattcacctataggatcataatcattagcatcttgtaattgtcaagccttcctcaccatattttcctaacagataatattaatgattatcatccatgactgtatgtgaaattgctgatagaagcctacaaagcacgcttataaaatcagaagtgaatgaggactaccacataactttttcaagtgccattaaacccaaatcagggagcaagcatttgaggctgaaagatgagcatttaaattacacaagttgacagtacctcgaagttatcagtatctaccctatagtgcctctaggtgatcaccagcaagctgataattacaccaaccattcagctttttaacacttctattttgttttttgtattttgttttttctcttggaatagccatttgaggcctcatagtgaaactatcctctgaaaggaaaaaggaaagagaggacgaggatgatcccctctgagctacatttcacaggattagatgtggctgttgtaaatagggattagacatagaaagtcagaccagctccttcataaggtatctacttcagaacacacctgaaagcgggaccccggaggcccccatcaagtagaacttgaagccccttcctaaagaacagatgcctcatacagtattttctctcttccttggctgtcgggatgtcagtaaaataaaaagaatgcagtctcctcaaaatagaacctggaaatgcaccccccctcctccaaatgagctatggggcaagagctccatcccatgattcctggaccacagatcaatacttgtgacaaggaccgggcaaagtgagaagacagagagtatttggagccttttctggtttttctttctccatcttccctgtccctgtctcctcattcctgtctctggatacccaaggtccctcacagacaccaacagcatcctatcattctcacctagcctggtcatcttctaaagttaatgtaaccataaaaaagaaaaaaaaatcctgcctgtcattaaaagaagataatacatcatgtctctgttggcaacttaagcaacagttcttcttccctgatagcagcatgcaggttgggggataattgtgactgtcctggaatgcttccttctgtgctgcactctgccccctggcctttcacatactggcctaattccagcagctgcaggggcaggtagtcctctgctcagaggatgtccctacctagtcttctggattttacatagtctcagaacttgaagccataaccataaaaaggctggtgtcacgaggcagataatgcaaaaagtcacaaaagattttctatccctatacaggcaaaccaagattccaaatcatttctgaccataaatgttctttgcgtgaaacaacagttaggtggtcttgctgttaatgttgggcacatattttttaaattgttgttttgctttgctttgagacaggatcttgctatgtagctcaggcagatcagaactcaagagtctcctgcctcagttccctgagtgccaaaattataggtgtgggtcaccactcttaccttagtattattgttattgttattactatagtggaatgcaccctggctaacataccatgcagacaacacatgcagtttggtgtgagtctcagtgctaccacagaggtcctcaactcctttctctcagcactaccaacttaaaccctgcctctctcctcctttttgccactgaaggcctctcacatgctggccatacaatctcactgtaagctgtacccatagtcctctggaggagctttttaaagatagaaaagttgtcatcacagtgattcatatcaaagtgtgacccctttatctttcaagtgacactgagtctagtttctctaatataagatctgcaatgccaatccctaaacagagcctgtgtgagaattctatggaaatgaatgtatctgtgactgccatcatgatcatcaaaaggcaagcacttcatccttgaatgaatcaaagttctagagaggcccaaatgccccattcattttcattagtacgtcgaatatttgctgtatctaaacaattggctctgttgaagttttcactttgtttgttttttgtgaatcacacgttttccaggttgaatccagaattccctatggagataaagatgatctcatctgaaacccttgcctccacctagtaagttccgggaatataattgtgtgtcaccagacttggtttattgtcactggggatcaaaagcaggattttgtgcatgctaagcaaacactctactgagcaaaacagagctgcatcctcagcctaagttttgtttattgcttcttgttgttttgagatatattctcacacagttcaggttgtcctgggactccagatcttcctatatctctgtctctatgtgctgtggttacaggcatgcactgccattcccaggcctgttgaatttttaagctgcacaagtaaacaatttcttttcctcactagaatgacttgtttaaagatggtgttcttactaaggggtcagcattgtgcaaacagaccttcagcacattgagaaatagctattcaagtttgctgtggaataatccttttgtccactgtgtgaatatatgtcactatgattggtttaacaaacaagctgacaggagaatacccacataagataaagttaggtgggaaagccaaacagaatgatgggatgaggaatggcagggccagcctccaaggaagcagggcatgtagaaaatgaggtaactatatgaatggagacagaggcagagggaagaggggagggtagaagggaggtggcaggggaatgggaagagaagggaaactgtggttggtatgtaaaataaatttgaaaaaatgatgaataaaaaaaatgaagtaacaagccatgagccacatggtggagcatagataagaaatataggctaatttaagtgtaagagttagctagtaagcagcctgagctattggttgaccatttgtaattgatattaagcctctgagtgttcacttgagagtggctgaaggacaggaaagcacagtatacagaagtcctctttcaagacagaaatatgtacctttcagaatagaaatgtaggatctattggatgtttgttttctcgtaacacaactgcctgatttcaggttcccctcaatacattttatgaaatgcagatcactttataccacaaatcacagtggtatgtatatacatttcttacatcaccttttagaagacaagatttttgagagtaaaaactatctttttaacttgctaacaccactgaattcatacagaatgcttttgctttttatttaagttggatagacatcacttcttctcctccattcaagttcatatatgttatgacagtatccctgaggggagcccaccctccagaaaagggagagagaattctaaatattcacaattcctaagtctgatattaagatcagatttcactcatttgaaatagctaaatacagatacaactgttcaagggctcaaattttacaaccccgttcctaaaaccgtagttgagagttggtttcagatttagattcctttgctaatctgcaattttggaaattaggacagagttgtgtgacctttgtacattaagccagctgtcccctctccacatctcttccttaaactcaccctcccccccccaacttcacgaagtgcagtttcctgtgctttgttcatgcaactcaacttctcctccaccaggtaccttcctactgacttgccctttaccacagccatgtcttgaccttggaatactatgaatccaagtccatgcttctcacagagggaccaaaacattcttgctgctttcatatagctccagctataacaccactgttctccccagaggaattaactcctcttgaagccctggctcaagctcttatatgatttctcaattcaccagtgcctgagtctgagtctcctaggatacttaaggacaaaggataaatatctctgtgttgcagttgttttgttttccttcagtaaaaactggagttccagtcttctgcattctctgtcactcctaagaaggggctgttaacttggcacatttagcctctcaaaatataaagaagaaaagtccaatctacactatgacctgttttgccactagctacacatcatttagcctcccaaatataaagaagaaaagtccaatctacactatgacctgttttgccactagcttctaaagcccactccttgctattcacacaatgtgatcatgccttaaggtgttaatgttatgaatatccacacatagccatgagcaagatgtagacttaatatgtatacctgagccctactgtgtgtgaacaaaacaaaacctcttagaaagtacccaacaaacatctccttccatgcatgccatagtaaaattttttttaaaaaagtcagttaaattagcactctttaaatttacttttatttatttatttgttatttacttattcacttagaagatggagggaggcatgtatgccatagcatacacttagaagtcagaggacaacttgaaagagttgttctctcctactaccatgtctgtactgagaattgaatttgggtcctcaggcttgatggcaagcacctttatctgctgagcaactgagcagcccaaaagtctctttgtaaaaaaacagaactagctaataccaagaatgtattatatatcttgactcaggctggaagaagataaagaaaaagatgggaatgcttctggtcttaagtgatcacaaattattccaggaaataatgtatatctaaggaatacataaaatgagaacaaatttctagttgtgacttgcacttctagtgccaacatgtagcaaatctcaggacatctcagtgtccagttcccttatcttatcccctgatttattggaagtttgtgggaaagccagtcacacccagcttgcttcctaggcagaaaggctgacccctatctgaaagccagttgacactgatgatgggcaatccaaatgccagtgtcaattgcttctgtatttgatagaaacatgtttttataaataaatttcagactttcaagttcccacagtgcatctaatatctcagacatggatctcctcaaaaagaggaaaactgaatgaatacacacacacacagaggggaagagggtcagggaggaagcaaaggaagaacaattttgcagctctcagtggacaaggtaacctgtattttatgatagtcattgcaagacttttgttattgtgtgctttttttcagaatacatggacagtacttgacttctatacacgaaactgctaactctagttgtctgtgaggggaaaaaatccttgcttgtccctcctaatccttctttcattttgaacatcataaacaaaattaaatgaagttatacataaacaataacaagggttcctgctgtgacagatggacccatccatccatccatctctgtagatattatctcatgaatgattcattgtctttgctttaacctagagccttttgtattttgcacattgaagtgaataaccattagtaagctttatgccttgcactgtgacagttactgtgagtctactgtagtctagcaagtagtactgacatctgggggatgggaaagaagctgctctggttgtgtttatgctggatcttccatctggataaaagctagagctaatcaaacaagaggaagtccaactccaagctgaattgtgctttttccttccatatttaaaaatgggctgtgtgtcttattcaacaccttaaagaaattagattgcttttcccatagccttactaaatattttatatatttaacaggagaattcatcataaaaataatggttgaataccagccctaaggagagagctaagttttcagatacagctttctgtactcttagaactgcatctcaattgaacaatcctacctatctggtgtggggacaaaaaccaaaccaagacttccacacgttggtgcctttctttactcagcaactgagtgtgaagtaattggttctgaacaatccctggtctttttccagacacctaaagtaaatttttttcaatgctgatttttccccccactactgctttgtgaagcaaggtattaaattccaggcatatcacagtgatgaagtcacatagacagacacatataggactgtctaggactgccatagctaccgcccactcttggcagaatgcagaggtcaggtgggaagtctcagatgccccttctctgtttccgtggtcttatcctgtgcttaagttatcaagcatgcccagaaactgctgggaacagcaaccttgaccccaccctccctccgctgtaccatttcctgcatggcagctaagccagtcctggctaatcattaacagcctcaggctgcagtgagttgttcacacctcagacctcagaggcagtcttgcctctagggtctcccttcgctgctggaaatgaagaacaaaagggaagaagacatttttttttaatgatttccccagaaatttcacataataaattaatctgaccatttcagctaggatgacacactgtaatattacatatattcatatcctgagttaaagctgtgaactgtgaacagaatgtaacctactcagtagagcccccccttagacccatgaggacagagtatgtacaactgttatgcagtaaaggtacatgactatgctagacaatggattcctgaggaccaaagaaaagtttggcagaaatggaagagaaggaagagcgtgagttaccccagagcaagtgaataaaggtttaaaatgcaacaccaagagaagaaagcacaaacattttaaagtgggctgacttttgccccagttctgaaccatgttgataaataaaataaagtggctaattagcatggcttgcgctctagcagcacaccaccctatgagtcattttatagtgtttttaacaagcaaggtcattaatccaagatagcacaaaccaaataaataatttagacagcagccaactgcacgtgtttcagggttcctttgcctgacctttgaaagacacagccccttcacgtgactgttggccagtgagagtgaagtcagagcccagaccaaggttaggtgaggaagaaagctgccaagcacgacattctcctcagtctgccttttgttcctctggcttcaccacagacagcagaaacagaagggaggcctttgtgtgctcttcactcagggaacttgctgacagggaagaggagctctttcacccatgcaatcatactgtaaaactttccctgtacagggcagagcatagtcatccagtcattcattagaaaatatgggcctcagttttctcctatgcaaaatggatacagtaatatagggttgaaaatgagggcggcctggaaagtaagctcagcaggttaaagtacttgctgcccttgcagagaacccgagttcaattcctagcatccacatggtggctcactatgatctatgactccagtcccagagaatccaaagcccatttctgaccttcacaaacaccaggtatgaacatggcacacatgcatatgtacaggcaaaatactcatacccataaaatcatttacaaatcttaaaaaaaaaaaacagggaagataaagtttttctcacatacttaagtgggcctggtttgacatagattgtattcaataaatcctggttattcttactaatatcaccacaaaagcagttactactatgagaacgtgtaccataactgtcaggcttgtttttctaagaagtggaaaaaaaactgactaatgtcttcattttgagagttacagacacctgaatcaagggtgttagttaaggcaaaagcaattgggtgcaatggtcaacaaagcagactaagcacgcagttgaactgggtccagacccaacacctcacttgattctggttgaaaaatggaactatctgtaactaatgtcaccagctcatcctctaataaacacagcttgtggagaaaaaaaaaactgataagttaccaaagctgcaaagatgtttgttattcagagaaaatgattgtcatggaacccctatattatttcttataactgcagaagaatttataattattttaaaatacaaaaggaaaactgtgccacttccaaatgtggaaatgatggaacactcgattgaagggaatctggaggccacacgcccgagaagcagatggacccttctgtcaaattaaaatctgatgagatgatcaggtttgtagtcagtccatagatttaaagtagaaacataacccaatgtagcatttcccaagtttaaccttgcatttccttagccgttggaagatgctaagaggccttgtgtgtctctttctctatgtcatacaaaagtataataatttgagtttataatgctggctcctatatgtttttagcacatggcatgccacacaaaagtaccatagattgatatgaagggattgagataacagaaattggtcatctccagttctggctggcagaagctcaaaaccaaagtaccactagggcattttgactcttgctggataagtcttcctgactatgcaccgcttcaaatgagccagggcctccttgacttacagatatatcaccctctctagagatctacacagcatcttcctaccgtaagtgtccagatatccaactttcataagatatcaggttacagtggattaggacccaccctgacaaactcatcttaagctgattgcctctgtgaagatcataatttgaataaggtcacctgctgaagtagcaagagttaagacttcagtgtagctttggaagacacaattcaacctttagcataataggtgggtgatgaacatttagctaataggctagctaagatgaatagcaactagcactgtgtagtggtgtcatcagatattttggaaggccccacctgagataccacatgttactggggaaaacttggagctccctctcttgggttttagttatattagttaagaatttaagataaggatatattcagaagaaatcccaagaacaattttgttagtgtttaaaagaaaaacataaagggcaggcaagctgtaaatctcagaagttgctagaagagtgagaagaccacatcttttcagttagtcatgggggtcagtgaacaaatacatagtaaatacgcaggcacgttgcaatgagacaaaggagctttggagaaagagtagcgtagcccaaaatgtcagggaaggcatgaatatgaaagagacaacaagaagaaagggaaaagttatactccttttcagtaacttagaaaagtcacgtggctatggatccatagaatactacacaatgggtggggattctggaaatcacattatctcatttaaaaaaagagttcttcctctcatctcagcatgacataaggtgaatcagccttcctgagagggtggccttttggccaagtgactgagcagaccaacttcatttaactcttgagagaggattaaggtgtgtttctacccacaggtagatttccttctttccactgggaaggcagagctcttaatgggcctccaaacctattctaagtgtggcaagcaatacaataaatatgctaatacattactgtgtgtaatccccaccccaagggagggaatccaaccttggagagttccagatctacggaaagacagggttgagaacctgaatctatggccacagaattctcagttaagattcatccatcacactgacagtaaagttggtgagcattctaattatctttggcttgaattttgatttaagagttaacggttagtttttcttttgttttttaagtaaaccattatctttacatgacaggaggtacaacatataaaagtgctgactgtaaaattcaagagcaacttgattgtcaatagccattaatcaaccagtaatcaatgtataaaccctctgctaaacaattaacttgttagaaaataataagcaagacaattccaactaggacaaatatttgccaagagataggacctagagaacacaacattcatgttcaaaggaccagctcatggctctccatttaattatttttgtaacatatgtaatgaacttgcctggaaatcagccccctgggattcttaggtaattaggaatcagacctttctgctagatccacaaaacaatcagtctcactgataactaatggaaaatctaatagggaagtgcaattgtaagacagcaggttacaaataaacaatcaataaaattgctgtgtgttcaattatgtacttgttcttgatgctatggcaatattggcagggagcaaaatgaccctggggtcctagaataaaccatcctttaccattttgcctatgtatggaaaccatagcttactccaagttgtattagtatctattccccaagtcaggttgaaaagcaagccctctttcatgcaaatgtgcaaagggcagcacagagatgtcaagacagctatactgtggcatgtagttatgagaaatgtaggacaagagctaccagtctgcagggtcaactcttacctcaaaagtttaatacactctggacctgacatagccagggatagcccatatacccttgagaagaccatcatcgggaagaactgggcaagccatgactattccatgttgtagactcatgcctccagtagctctcaagagtgaaagagccactttaagccatatttgtagaactgggcaagccatgactattccatgttgtagtctcatgcctccagtagctctcaagagtgaaagagccactttaagccatatattctaaggtaaatgcttacaccctatgggtatttgaaacaaatccattcttcacatgctctagtgatattatatgtacacaggaagtaaaactgacttccctgcccttcctcactctccctccatttgcctcctcccctgctgccctgattggccacatttccctgcagcaataatgcaatctccttccctactaagaaacctgctgctattttgaatgtaattgcccagcaccctgcagagaatgcattctcaaaagcgctagcaaggctttccatagagaccaggcagagtttacctaaggctaatctggagcatgttaaggacctgttaaaataatgaacgttgtttcttcaaatgaaaatagaaacccctcaaattaaggtatcgacttgcagttccaatcttctccttggactagagttaaattttttcagcctagcttatgcaactgtgtgctttacaagacataaatgggatccattgagaatattcctaacatgtgactgaagcttttaattcccacacaacctgcagtttagactccagacccattcccaaataccattcccaataatgctgcctccttgtatctatcagtatcctgcactaccattataccattccttcgctagatggaccaaaacaacccctaaccagccagtatcaatggcccatgccatggaaatttttttcctcctggggctttgctataacttcctcttccttatacaactgcatgagttgtatggctctacaggactgctaaaatagattagtgtataaagaggtgcacgcttgctttcagggtgtccaacacctatgcttgtggcttagatgctgcagctccatgagggtgttctgcgtgtttgtattttaagtgataaggaaatatatgtgctgttagctgccatgacagtgagggaactttgatgacataaatgtctccagaaagatgatcgaattggccccttcacagagtaaggctgccaaggaactgaaggagtgggggcggtgtcagcttcagggaaacacagtctgcccgcaaatcactttctcttataactgtactttagaaattgatttttatattaaaatggacaaatggatagaacattcaattaacatgcatcacctttatctcctttggttcaaattaacccctgtttgaaagctctgggcaccacagaaaatgaatttaacaagtcatttgaacatttccaatgactgattagaataaaaattgttgtgctttttctactacaagcatcaaaatgattttaaaaggttttcttccattcactctttctttgtttatttctttccttctggtactctaaagactgaagcaaatgcagaatcccccatccttggatcaatttttcttgaatgatctaacaggtatctgctttctaagaaaccatgcatttattcataagtgtttattgaacacctacacagcaccctacaatatagaaaatgagcagatagcaacctgctctctgagatcccacaacagagagacaataagcagatgaatacaggtttcagtgctgtgtgcatctctataacaatagagaaagcaggctaaatgcctagacaaagatagatgcacaattaccatggaatcaaaaatccctccaggataaagtatccctggggcagaggccagtatgagtgaaacacacaacatcatctacacccaggaagaacatctcaggcaaagacccgaagagtcagtaaagctccttatcaggagaaagatgtggctgagtagtgggagaagtcagaaaggaaaccagagcccaggtagcttttgaaggacatcttaaaagtggatttgaacaatcgaatgacattgacaaaaatatcactggaagctattaaagagtttccaacaaaggattggcttacacgatctgctttattatctaaaataacttcccaaccagtgggaatttaaatctcttggtttttctttttctttttgttttcatcattgtgttttttgagataaggtcttgctatatagaccagtctgaagcttccatgttgccggcttccgcatctccgctgaaagaactacaggctctattcccagttactcccagtctttatctttcactcacaagttcagtggactcttcttcatgtagccagtccttcatttccagtcctatctggtaactcatcaactggacttttagctagcattcttgccctattttcttcatagtgtagtctgtctagtaaaaattttagttttcaaaccagctcagggtattttttttttctttaggaaaatcttcggttctcttactgaagaacataaagttcaaatcagtcattctgtaattagaaactttacaatacagtcacaacattatcaaataccaaagtcaaaatttaaactctaataaatgtattgctatctctgccccttaaatatctctcattcattcttgattaatatttctccctccttagaaatggatgagttttcctttgacaccagccatgtatgatacacagatgacttacctgctgagatgtaattcagcatctcctttcttgaggttcctctcaatgatgccagctctgaaaggccagagtaagcatgaagcccacagagttggcatggtttttgaaatattatacgcctaccttatagaattatgtgatgttctcagactaacaatgaagcccccagggcgcactaatacttatgtagccaactcaatagcttgcacatgaggcacaaagttggtcttcaaacagtacttataaccacttatatagccttttaaattaaggaaaagttagagctttaccagtcctgggccttgattttatgcttaagaaaatcaaggtcctcctaggcctggcccaggatgatgtggtagacttgggggagccccttttgagggccttaccctgcctggggagtggagggaagatggctagggacaggtgggatgttggggggaggggagggagaaggagagggagaagggattgacatctgaagcaagcttgttcctaatttgaactaataaaataaaataaaaatttaaaaaaaatcaaggtccttagatgtgaagggctttaatttagggttacttattgacaaaaaaagaactcaaacctaggtctcctggttctttccaaatcatgctgagtggatcaaagaatcaatttcaagcacttatctatcatcacattctaggtatcaaagctaaatatttccattctgtccagtcctttttcgttaacacaacactgctgttgagtgagcaggtgaccaccaattacagcaaggacaattgtaattctcagttacaaatgaaagacgccaggtctgggtgatgatagcaaaagggaagcaattagaaggcagcatgactcccagtgttgacgtggcttatgagtagatgtagcactatgcaccaggcttgggagtcaggctttagagtcatgaagtcagcatagagtaattcccggcactagtcctgctagacaatagaccacagcagctctctctactcagaccagcctggatagattcaaagatcccacccagccacagtgataaactggttagtagtggggaccaagatatggggagagtgaatgcttaaacctttcaatttccttagtagataaaccattcaggaagagagtttagaatttacaaatgatatactatcatgaagaacaaataagaagtaaatgtagcgtgtggactaccctaatcatgatgagaatgaataaattgtcttctctgatccagtctctgcttagaatgatggaatgaaggagaaaaagagtatggtgagggcatgatacagcgtaaagtgtggctgccttggaaagagtccactaccagttccacatgggtcaggatcatgtcatctcaaaggccattcagaagcactagtgtgattcctgccgattatctctgggtttcagagggagactgattctgagtatgagctacagacaaacacaggtcataattagaatcctctcagagtaagtctgggtccagttgtcttaatggttcctgagtgttctaatctcaattattatcgatattgataatgagagattacttctcccttctacacactgtatctttccagggattttgtttatattatataagttacccattgagaaaatgatacaaatccacatcccctccccatgtttcagttaaaaaaaaataggttgagaagttcagaaaaagtgaaacactgaatggggatttaacaagaacagtagatccagagtgagagtacaacagcaaaccttggctctagcaactgtaagtctgcagctttcagaaaatcattataatatccctatgctttagtacttcatctggaatatgggagggagactaattgttgttatatgttctccctcacaaggaggaactgctgggaaggaattttagaaaatgtagctacgaatctacaacatgctattcaaatatatcttagtaattatcataattgtgacacataagacaaatagcagaagacaagcagaatacagattcatgcatagacacaatctgactgtacgtgggatgctgtggagtaggcacagacattctaagatacagcttggtcctgacttgtgatctagctgaatgtgtgcatgagaagtatcttgagaagctgtacccaataggatctgaaatgtaggatataattttgtagctgccttacagttacagggatgaatgaaataaaatcattgaatttaaagtcaatcttgttactcctgatggattggctgcctgacaacattttgaaactgccagaggaagcaaagttacatttatataactttgaaactgtcagaaagtgaagagtaaaattaagtttgttcctttttacaactacaggtggaggtaaattgcactgctggttgaacgggaaggcatgtgacagctctaatattatagatgagtagctttatgaatgctgcaagtttgtgtacagagaatgatttttctcctctttggtaggattatagaaaactgatggattacagatcagagccaaaagagaaaagtggaaccagcaacaatataatacccactcagcagaagtatagatgcaggaaaagatacatttgtttcaatttcaaggcattactatttgaagggaaaaggagcatcagagttgatgtttacatagaattgcttccaatttatgtatctcaagtcctcttctctgataagagtttatgaatcatacaacatgagtgtttatttataaatatggtacaatgagtttttaaatactcctcccaaacatcaaaagttatgtctgcagccacacaccttgttctctcaaataataaacaggaaatgacctttctccttaacagttggacactggatcccaagccctccaaccctccagcagccctcatgtagcatcagtctctgagcattgttccctcagcttcttcatggcatccagtgcctatgatccattcttcctttcttttcacctaacaatatgcttgtctgagtttcagtgctgcctctctggctctgccttaacccattttgatgctggtcctcttccaactgatattaaatagccaagatagtccttctcatattagattctctccatgggcaatctacttacagagtttgctcttttatagaccttgttgtttgaaattctaaacacatgaaatgtcaactcaccttccagccccctcttctttatggcttcagaactgcacagccaactagcttctcagtgtttttccttgatgcccacattaaaaaaaaaagtattccaaattcaatttctaatcactcttctcaccatgattttcatatgcaccttacaacaagtctatggtctctggagaataacttgctcctcttgaaaactcttgtcaagcaagtggaaatcagtagaactctatttgggcagctacagtggcctccaagctgattttttactctcatgcccagtgttttctacacatggtagcatgggtgcttattatgtcactccttatttaaacactttccactgttaagtgccacacaggacagaatcgtcagtaccaagagttcatgtatgttgtcattgcttccttttagtcctcaccatcagctagtctcatctcctcttaccatggtcttctgcttgtccatctttggtttatacttctatgttcagaattctgatctgctttttaccctcttagttgtgtccattctttaagtctcaaatcaaagtccatgtccaaaggtaagaaatttcccaggctgccttcagtctgggctagaactctcattctatatttctatcacatttccttcacaagccccaactctgtcaccagcaaatcatagtccatgtccataggtaagaaatttcccaggctgccttcagtctgagctagaactcccattctatatttctatcacatttccttcacaagccccaactctgtcaccatgtaaatagggaaattgttcattcacatctctctaacaccttcatttcatagtgggcaccagttttctgtactcatgatctatctttgctgccagcacagaatgccataggaaatattcaactagaatttgttagaccaacaagtaccccaaggctaatattcccaggaattgttttcttaagatatattttaccagtaggtggaaagtagacatcatagctacttttaagacatgaaaaatgcaaannnnnnnnnnnnnnnnnnnnnnnnnnnnnnnnnnnnnnnnnnnnnnnnnnnnnnnnnnnnnnnnnnnnnnnnnnnnnnnnnnnnnnnnnnnnnnnnnnnnnnnnnnnnnnnnnnnnnnnnnnnnnnnnnnnnnnnnnnnnnnnnnnnnnnnnnnnnnnnnnnnnnnnnnnnnnnnnnnnnnnnnnnnnnnnnnnnnnnnnnnnnnnnnnnnnnnnnnnnnnnnnnnnnnnnnnnnnnnnnnnnnnnnnnnnnnnnnnnnnnnnnnnnnnnnnnnnnnnnnnnnnnnnnnnnnnnnnnnnnnnnnnnnnnnnnnnnnnnnnnnnnnnnnnnnnnnnnnnnnnnnnnnnnnnnnnnnnnnnnnnnnnnnnnnnnnnnnnnnnnnnnnnnnnnnnnnnnnnnnnnnnnnnnnnnnnnnnnnnnnnnnnnnnctttggagcctatcctggcactcgctctggagaccaggctggcctcgaactcacagagatctgcctgcctctgcctcctgagtgctgggattaaaggtgtgtgccaccaatgcccagctcactgttcttttaaatattaaaggcaatattgacaaagctaattctaaactaatatcagatttaaaataatcatgttacaggtacacaatcaaatagagtctgacaatttaactccaatttaataatgtattgaaagatatttttaaatagtcaagttttagaagaaatttacttaaaataatacttaggcaagtttgtcttcaatattataattttgataaatagaatgaattctagattgtcagtttttctatatcttttttagtttaaaatgtgatttctcaaatgtttttggtatggcttgatattggtaaatggacttgtgacagcaattacttccaccctggaattattacctaaaagttacaaactatctggatcttaagaacagaaataatcatcttaggtacagcatggcttagtgaatatcatatgctcatttaaaccatatgtcagatgaattagaacccatgaatgaaaaagagaactaaaccaagaaagtaagtagcagagttagtatttgaaaccaagaattctgatccaagaagacatgctcttaagcctttgttgcactatccctgaaggtttgctagctaggtgagcattaacgattctatactcagaatctttacagagtcctcacaatggcattaccaggataaacgtgacttgctttatgaatcacattcatgaaagtggagacccatgatgtaaaggaatggaccccacatgtgagttcttgagagtatgacacagtgtttgggaatcccagtcccccacatgccttcattatcagcactttgctgcaaccatactgtagttttgcatggtgctatcctggcctttggttgttacagtgtatacatggtaccaaaaagttacaacttgcaaatctctgaaagaaccgacctgagacagctcctctgtcttcagtgtgcttggtagaacaaatgtccctgtgattaagatgaacatcaattggctagatagacaattacattttaaaacataaaatcattttactaacatattcttttacctactgtcttctatgtcatgatcccaaactatattaaatcattagtggaagcttttgcaaatgatgctggcataactggatgctggcatgtagaagactgcagatagatccatgtctattgccatgcacaaaatttaagttcaaatggatcaaagacctcaacataaacccatccacactaaacttattagaagagaaagtaggaaataccctgggacgaataggtacaagacaccatttcctgaacataacaccatagcacagacactgagatccacaattaataaataggacctcctgaaactgagaagcttctgtaaggcaaaggatacaatgaacaagacaaaacaacagcccaaggattgggaaaagatattcaccaaccccacatctgacagagggctgatctccaaattttacaaagaactcaagaagctagtctccaaaacaccaaataatacaattaaaaggtgggatactgaattaaatagacaattttcaatagaggaatctaaaatgcctcaaagacacataagaaagtgttcaacatccttagccatcagggaaatgcaaatcaaaacaactctgagataccatcttacactgtcagtatggcgaaaatcaaaaacaccaatgacagtttatgctggagaggatgtggaaaaaggggaacactcctccactgctggtggagtgccaactcgtacagccactttggaaatcggtatggagattcctcaggaaaatgggaatcagtctaccacaagatccagcaattccactcttaggcatatacccaaaagaagcacattcctacaacaaggacatctgtacacctatgttcacagcagcattatttgtaagagctagaacctggaaacaacctagatgcccctcaactgaagaatggatagagaaaatgtggtgcatttacacagtggagtactattcagcaggaaataaaagcaatggaatcttgaaatttgcaggcaaatggatggaacttagaagaaaccattctgagcgaggtaacccagtcacaaaaagacaggcatggtatgtactcactcatatatggattttagacataggattgccagcctgcagtccatgctgccggagaggctggtaaacaaggaggaccctaagagagacattcatgatcccctggagaaggggaaagggacaagatctcctgagcaaattgggagcatggggggaggagagagggaactaggagaatgagaaggggagaagaagaagggtgaggaagacatgatggggcagggaggttgagttgggggacgaacagaagagagcaagataagagataatataacaaagggaaacattataggtttaaagagaaatcagttactagaaaaatgtctggagagctacaaagatgacaccaactaacaatctnnnnnnnnnnnnnnnnnnnnnnnnnnnnnnnnnnnnnnnnnnnnnnnnnnnnnnnnnnnnnnnnnnnnnnnnnnnnnnnnnnnnnnnnnnnnnnnnnnnnnnnnnnnnnnnnnnnnnnnnnnnnnnnnnnnnnnnaaagaggaggactgatgagcaatgtggtccatatcaggctggcgaaacccacagaaacagctgatctgaacaaggaaaaacacttggttcccagactgatagctggaaaacctgcatggaactgatccagactccttgaatgtgggtgtcagtgagaagaccttggaaatctatggggcctcttgnnnnnnnnnnnnnnnnnnnnnnnnnnnnnnnnnnnnnnnnnnnnnnnnnnnnnnnnnnnnnnnnnnnnnnnnnnnnnnnnnnnnnnnnnnnnnnnnnnnnnnnnnnnnnnnnnnnnnnnnnnnnnnnnnnnnnnnnnnnnnnnnnnnnnnnnnnnnnnnnnnnnnnnnnnnnnnnnnnnnnnnnnnnnnnnnnnnnnnnnnnnnnnnnnnnnnnnnnnnnnnnnnnnnnnnnnnnnnnnnnnnnnnnnnnnnnnnnnnnnnnnnnnnnnnnnnnnnnnnnnnnnnnnnnnnnnnnnnnnnnnnnnnnnnnnnnnnnnnnnnnnnnnnnnnnnnnnnnnnnnnnnnnnnnnnnnnnnnnnnnnnnnnnnnnnnnnnnnnnnnnnnnnnnnnnnnnnnnnnnnnnnnnnnnnnnnnnnnnnnnnnnnnnnnnnnnnnnnnnnnnnnnnnnnnnnnnnnnnnnnnnnnnnnnnnnnnnnnnnnnnnnnnnnnnnnnnnnnnnnnnnnnnnnnnnnnnnnnnnnnnnnnnnnnnnnnnnnnnnnnnnnnnnnnnnnnnnnnnnnnnnnnnnnnnnnnnnnnnnnnnnnnnnnnnnnnnnnnnnnnnnnnnnnnnnnnnnnnnnnnnnnnnnnnnnnnnnnnnnnnnnnnnnnnnnnnnaagttatataaaatttctctagcttttatctctaccacccacaatcacaaagttttgaattggttaggccagtaggcaaaaatgcttggaggctctatgttttcacaccaaagtgggaacttggaggctctatattttcacactgaagcgggaagcccgtgttctgcctgtgatcattctttacatatcaatgtactgccagcacttgcttgaactctaccccaaatatgcccatgttcagtgccttccaaagtttatcaactaaagttcctgtggaagaacacatgaacacccagttccctgagccccattctcatgataaggcattaaaaaaataaaaagttcctggactacactaactactttcccgaattgcaatttgctataaagagaatgttttgttttaatattgtggataaaccttttccaaaactaagctaaatgtattgtctactgtatcttagcagagaatcaaagagctcttgaccttggcattgagaactccgttcattttcaagcagaagtgtatagttcccttgtgttagctaaggagaactgccacagttgtcatatttgatctgtgccttggcagctggaatcaaagacctacattttcagttcacttctcatgactagtttcctcacagccccttctctctaaatcaattttcccatcttctctgccacactaatggatgcagaatggctcataagtgatacttgctcactattttgtgagctcattgatccagtggtgaagaaaaatgtccctccaaaaaggcccttgtgttgatcaggtttaagagaataacattctcattaataactgccttgctataaaaataaggctttctcacctagcttcttacctgagtgtacattccctcaccccatctatttgtcccttctctcagccaacttcagttaatagtcattgatctaaatcaagggttggaaaataatctacagagctaggtagtaagtagtaaacacttcaggctttgaagctcgtaaaatctctgttgcagctattaaactctactgttgtaatatggaaggcaaacatagacaacaatataaactaatgaaagttccagtaaaactttatttacaaaagtatgctgtaagctgatttgaggcatgcctgtagttcagtatgaaggttgatattggctatcaatatgacaggatgtaaactcaactaaggaacagaaggtctgtgagggagattctagattgagttgattaaggtaagaagacccaccctgaatgtgggttgcactcttccattggctggagtctgggactggacaaagcagatagccagcttagcatcagcatccattgctctctgccttctgattgtactgccatgccttgccttcctgctgtggactgttgcctcaaactgtgagtcaaaagaaactcttccttccatactttccctttgtcagatatattgtcacaacaataatcgaaataatgaatactctgattcttgactcaaatggtttttaaaaaattggcttttaacatttattttattatttgatttacttatgtttgcatgccaaactactttaaaatattttattcaagaataaagtatgactctaggatgaaacaaaattcaggaactctgcattataaacagacaagacatgaaaattggaaatgttgtctagaaccgtatactactatgcaatgggaaattaacagataaacataatacgaatgatgttcacaaccaaaggatccttcaaataccaagagcaagaggacatcttgttgtaaatgatcctacaggtaggacttcataggtgtaggtgaaggaatgagcatgccaaaaagaagagtagtgcggtccaagcatgggtgaaacagccagtagagtccagagatattctgtagttttgctgcaatgtaaagtaagcaggaaagaagtgaaaggtcatgataataaggtttgggaaggatgccaagctaagcagttgagtgtccaacagctaacacagagaacaattggatgtactggagaagggatgaacggtgctggatcttcactgagaatcaacatgaatctctcttaactgatagcaaagagggaaatctgaccacaaatcttcagaaaaaaatgatgttcaaagtagagggagggagaaagagataaatgtttttccccccctctggggcatacatacactacctatagggtttttcaaattgcccactttgatcccactgattttgatatggcttactagtaattgagaatcattgtctttggaaaccattattacaattatctatgtgtgtcatggttgttaaagtgggaaatactatttttttttaattctgataataaggatgtggtattaccttaacgttaatgtttactgaggagaaatgaacaaatatgtcattatgcctagacagggcatcaataacagatgaaagaaatgattgccgattttgatatggcttactagtaattgagagtcattgtctttggaaaccattattacaattaactatgtgtgtcatggttgttaaagtgggaaatactattttttttaattctgataataaggatgtggtattaccttaacgttaatgtttactgaggagaaatgaacaaatatgtcattatgcctagacagggcatcaataacagatgaaagaaatgattgcacacaattctagtttgataaaccaatgagtttaattagggttacttaaaggaaaatacgcataaaaataagtctctctgctattgttaattacttacatatttccagggaagagatataccttggcatctcatgaactttcccataaaccacttgtatactcttggttgttcatgtagggaattacagctactccaaattatctagacccctgggagctagtcccggggtcatacagtcaaggctaagtgagttcagagatggcatgatctaaagagttgagccaatcatgctgaggagtaggcaaaagaagaagaagaagaagaagaagaagaagaagaagaagaagaagaagaagaagaagaagaagaagaagaagaagaagaagctgcttctaagtctgaagcttgtagatttgaggctctaagcagaggtggtaataacagtccaaaaagaggtgacctcacaaccaccatctgtgtcattcagagaagatattcagagagaagctcacgcttcagggttgctcatattttggtggcacaagaagaaaaacaaaaagaaatgattcacaaaagaagaaaaagcactgtccagataccaagagaccaaggctaaggaagatcaacaagaatgaattggccaaattactgacaactgaaaaacaggcctttggagtgaggaaagatgtcaccattcacccctgggagaagagcagatgggctatagcagaacacaggctgcagggggtggaggcatgagctgggtgaggaattgcaagtagcaactgtaaatcctcttgagaaatttgggagtggtttgttcctgggctactataaataacaggaatgcaggaagcaggaagtgagaagatgaaagggacatcttagtaacaggagaagagtccacaaaggacaacatttgggattaaatagccccaaggttacaatcatcacatggtatgatgcgaggcccttgagatgtttgccacccaaaggttggagggtgctggctttaatagtgggacagctggccagcaatcaccatcaaaagtagctggagagcccctgagtgcagtcacatgagaggtacatgatatgaaatagcttaagcagacgaggattacattatgcagaagctaaagctgtgagagagaccaccaactttgattgacatacatatgaaaaaagaggtcatgataaagcagtgtactaatttagataatgactacatattatgaacaaatgatggagacagttcatttttttcagcagagtgtgagggcaaagttgaatttggtatatgactcagcatttattggaggtggctctttttccttcagggagcccagggaatgtcatcactgctataccagactcacagaccagcttgtctcaggatctgtgtcatgtttctgggtgtcccagacatgaatttgcttcagccaactcaaccttctgtcaatttcatttctagaagctcaaaatttcaagcaaaaaccagcaaacaatctacaaaacatcaccaaacaatcatctatggatatctagttttctctttacacaagatctattaagactttccatgatcagagtcaaccccaggagagctatcacttacatcaagtaacatgcgcataaggaatatagactttcttaacaatttttttcatctgcttccatctgttcaaaagccactggtcttgaagtacctgaaaaagtgggtgtttgtgaccaagaattctgccctgccccaaacccagatcagagaacagtcatcaatcactgtgacaaggtgagatgaaaaaaaaattaccatcatttcttatgtggcatgagctgttacccagtgttatgatgaaagcaaaagcccaaggtgctttttgagactttgctagtgtctacaatactgaggagtgcagaactgaacagcctagggaatcctagctgcagacttgactctcagagatcacgtttctgtgcctgaaaaggattcccctcattattcttgggaatgaaccttccaaatagggagtattctagattttctcactccaccaggccagaccttggggacaccatcatgctctgaaacagctgggctgaactcaatgataaggcagactagattaggtgacatgatgggacattccaaaatagccacatagccctcctctggtcactgaaaattttccaactggtggtccaagcagcacagctacaatcttgactatcttctctgattactatcaggtatgaacctccctgtgattagaaattatatctcacttgctagtgacctcatccttactggacgtggtcacatgtcctcccaggagggtcagcagttttacaatagtctgtcatgggcctctttatagtctttggcagaatggaggggggggacactaatatgatgacctcccagtaactactcagggaccacctggccagtagcttaaaaatggaactcatcacagataacctcttacaggttcagggtacgctttctcatcccaagtagaaaacatttccaactatggaaccattaacaaatgatccacatacagctctgtcttttggcttttgcttctctctgatctgattcggtacctaaacaaggcagaacttgaagcctaacatagcatcccagtatctttcaaattcatcattttagggaaaaaatttaagcttctgcagagcaaaaaatatcataatttcataaaaaagaaaacaacagattgtcatccatatttgctgaaaatattttccccaaagagttaatatttatattacttaaaaactcatataaaatgataagagaaaatgtctacttccagttatcagcaatacccacttgagtgtaaaatttattctcttcttgcctcagtcttttcatcaatggatgcaggtcagaatcccagcacaccacatgatcagtttcaaatgcaacaaagaagtgatggcaaatcagggacattacctgccagtactctaacttcacaatgaagaaatgtaaatttatattaaaagaaaaatgggtgatggtaatagtcaatctttctaactatcctggaaacacagactagaagacatcttttatctgttgcagaagaccatgagaaacacagagcatcaccacagtcaataaggtgtcaggaagaccaggcatcattaggccattgcacccattctgtgtaaactgggacatcctttggaaagccacttggcagtatctctaaaataaaaaatatttatctcttttgatcaagtgtgtctgtgctaggaatttctttcatataaacagcctgaaagatattcaactagaaattcaaatgttttcattgctacaaattcattgtaatgaaaagatctagaagcagcttagtgtacaatatcaaacaaatgattaatttaattacataaggtaaaaagtagagactgcaaaatcagatgtgaattgtgcttgcatcatttatgtgcacatgtaaataagaatgaaaacaaatttgaaatatctattggctttctgggtgccaattatattggtacagtttttattttttactgatttttatctgttgttcttttaaaaagtaatgtgacacccagccaacagtttccaccttgcctgggatatcttcaccacccagctagatgagatgctcacttcataataaccaagtgtttctcctcccacattgcatacagcaatactatccaccactcaccaggggacccccccaatctttctagaccctgtgcctttggagaaaatgttaaggaacctgaacacattccaggtactgtatatacattcatatattatgtaatcctcacagccacccaccaggaaggtgtaacaattgcccatattgttcactgtgactcacaacacttaatactccatacctaactctccagacatgcctactgctccagtatctgaattagaccctgggccagagaggtggatgagcatgttaggatattcaagcaggtatgttaacccaagatcactagaacccacagagaaagaagagaacaaattccttcaagttgttttctgatttccacatggacaccatgatgcacaggtatccaggtatgtggggttgacttttactagaagaaactagaatgaaattatcttcttgctaatgaggcacaccagaagcttaaggctgtaaggtctaccccagcaaactcaaggcaagttaattctggtgcacaactcttttttcctagaatctcttcaactacctagcctacaaagtcaatccatttctagaaggaaatggcagatgatgctggacagtaggtatagagtagctgctctaaagtatttaccaaggaaatgacttggaaaatctgctcaaagctcagaccggaggtggaagtcaattttcaaagtccatgggcttcatctcctctttgctctccacctctctgctcagggctttctaaaacttctacccaacctcttaatacactctcaatattctttgtcctctacccatagaatttactaaaacaaaagaacacattaacatcccaagtgtctatgtgctgcttcccttaaagccattaaagctgagaagtcttgagtcaaggaagcaaatctcttgtgaaactttagattttcaaatagccattgagcaagcaatggctagagaaagccggctgtcatggagtccctaagaagaaagttgagaacttgagagtcatgacccggtttgttggcagccaaaaggcttgcctatccttccatgcatgcaatcaaatactttcttcaaaccataaataaatacaatcgaactagacttgtatatcttaaaatagaaatggtttcaggttttttccatccatatatgtaccttcaatcttaagtttaaagaaattgatgcactaagaaacgttcctttttctcagaaggtatagtgaaatagaggtctagtcaaagtgccctggttgcacaatttctctaaaggataagtacatctgtgccatacaaagtgacctcagagctaaaaatagcacaaagaactgaaaaggacatttgccaaagttcttaaagtggccagattgattaaacttgacatctgtctaacttaataggactgatcttaggaatttggctcttcttttctgagccagtattgctgcagttgaaccttgttaacagctcaattagcgtcaaaccagtaagagggactggatgctctacttatatcctggtgtgtagattccggcagtcacatttgtagacccaacttatttagaacatgttctccacgaagaaaagttttcctgaaacctcccaaagctttaattagaaatgccccttttgtttgaccataagggcatctagcttcacagcacaacatatatttttctgattaaagagcttcacctgaccaggatgacactcacggttctcacagtgaatggtcgagttgtgctccagttgtgctccaattatcctgagacaacagtctgcttaacaggacaggcagtaattgaccactgagttattctaacggaacaatccatacaaatggattgagccagctctcctcccagggggtcagcatgtggagcagacatcctaattatccacagccagctgaagccatacatgctgggacttttctggtggcttcttggcaatgagggatgaagaactctatgtaggtatttgatcttccgtaccaatggcagaaggattttgagtcttacatgaggcagactataggtccaatagtcctagagtccatgccaagttccctcctagacctcctcaaaccttggatcttggtgatgaatcttgtaatagtgaataatgagtagcatcaaatactgaaattgaaaattaccattaattctctcctatcaaatgtattagcaaatacttagtactcaatcccctctcctttttctctttccccttcctttactcccctattctctgttggaatcagtgatattgagctatatattgactttcatacacatatacatgcatacatacattatatatgaaagtcaggttaataaatagtcatgtgctgatcttaaggtatagtatgagaacccatctgctaataaatctcagttatagtcagacatttccacccacggaacctaaagagagctaaatctcacaatacatttgttctctaatacaaggcaactctgatgtacaatctgaattttccttcctgtgcacaaaggactttgataagcctatgcagaacccgttttcctttccagcctcacctcccctttacctgccctcttggctagaattctagttccatcatacatgatgaataccccaataaaatcccacagagacagtttcaacaagaatataataagcattcaactcaagcactgttgaataggttaccatcaaccttaaatggtcttcttccaggatgcccttctgctacctcttgttggagttgaaattctatgcattctcatcacccctcatgaatatttatatgataatatttcttattcttaaatacttcttattttaaaacaatttaaattcttagttgaattgtttgtgtgtctatcagattacatatgaaaaatatttctattgtaaacaatcactcctatgcctcacttgtgatgaggactcattatctgttcaatgaataaatgaacaggaaaggaatggataactgatcctaaacctgttgcctataatacccctttcccttttcttttatcaacttattgaaaccattcttagcccttaggcaagcagataaagcacatcttaaaaaaaaataaggcaatgtaagtatgaacacaatatttaaataggattgtagtgatggctgaataagcttataaatttattttaaaatattggcataatactgactttattacatgtaattatatccattgtctattagaaatgtgaactgaaaataaagtgtttactttatagaatggcccacaatgagtgggagcatctcagagctcaaaatggtttagaaagtgatctgaaatgtggaaggagttaactatggaaatcccccctttattctgtgagtgaaattgcttgtaccttctgaaaaagacattaactaggtcccacatagtaaacgtgtttaatgagagcataagagttcacgtaatgaaactggccttcctccaaattggtggaaaggaactaacctaatttcagagtttgattcatggtttggaagaacaacaaatttgtttcatttattctacttaattgaattaacgagttgagttcaaatgaaacaatttaactcaaaaattatgttgataacaaattaaaagcaataaatccttgcaatgaaattttattggttcaatattttctagtttggtatttctcatcaaattagagtgttgtctatttttaattggtactgctgtattttatatccccttaaatatttccttggagttttccaggtcttcaatgtagagttgataatgtcatgaactcttcatatagttctgatctctatggtccacattatataaaagtatttccttttcaatttttaaacactgacttgtgagtttccattttaaataaatcttttataaataataatggatgcttccatctatcagtcaaaaaacattgtttttctttctctaacttttttagtagaatgtgttactaaagagggaagtccatgcctagtaatgccttcagccctctcttgtttgcagagatagcctgaggaacaaattcagctggcaaataactcttgtcattgccaacctgttaaaacacaggagaagggtgaaagacagtgaattcctgttggaaacatcaaagttaaatgtactgcttgacagacatttaataaaatcagatacgaagaacaggaagggtaagtcgttgtaaacatcagttggcatgccttgcagttcttggtggtctgagagtacagcttcttattccaaagtctgtgaataaaggcagcttcacagttgctctcaagtcttcctagctgaaagaattcttgtacagttctaaaacagacttatttgatatctattacagagacttcatggtctaggaagaaattggtgatttacatttgtgaccatatttccaaaggggggaaaaaacctttttatgaggtgaagggaatgtgaggggcacacagatcacatgcagctgtctgtgtcaagcagttgtttttctgtccatttctggattcagtacttcagtggcatttcaaaacgatattagggtctattcctattagtgttgcttttctgatttaaagcaagtgttagatctttttctaaattgtgttttactttgttgtgattgttatttctgacagcgaacagaaaagctttgaaataactgtcctttggcataaaccaatagccaggatttaagcttatctgtcaaagactatagcaacagacttaagaacaaagtggttagttgtggatctctaatctttcctgggttttgtaactaggtgttttcaagtccttcatgggaaccatgccaacctctctgatctccttaacaaatagcatcttctagacctgcttactccctagcgatgatcagtggcttaatttcagtcctggggattacaatcaattatttattacactagccttgaaaatatttatggaaaccagaacccatttggttccaaagacagaactttttttctgaagaaacagtagcattttttaattgctaataaaataaaattctgttcttcatttgaaaagtgtatccaagaggcatgcaagttcagagggtttagaacatgctactccaggtttccctgaagtaggcttgtgttcgtctggctgaggacaattatccacatacctgtggaagaacctttaacattttatttggtagcaattgaatatataaaaataccatacaggtttactcctgagcaatttgattaaatagtaaaaatggacatatttcttcaccaccacatactgtccaaaaatttttcagcatcttcctagggtaggaaagtgttgaaacactaaatgatgcatctgctaataagatgtgaattaaaataatgaaaagcacttttctttggttattcttaaataggccataaatatttacacccattataaaacaccttaacagctcagtgagattgaatgcagcaaaattgactgcaatataactccaaacagtttataattccagtggactttatattacatctgagagagcttaacacagagaaaagtctacaagttgactggttaatgttctttgtttcaataacattcaaaagaaacagaatttcttgaagtagaatctatatttatatacagtgtaatccaaaacatcttgtaagaactcaaagagtaagacaaaactctgaagctgagtgcttgagtctgagcatcaatttttcacatatgctgtgaaaaggagaactcgtgcctaacacaaacactcgacatgtcatgaacttaatgtttaatgtgcttcctaatgtttaattttatttcctgattatccaaaatatcctctacactaagtatgagaagaaaggaagaaagtatgtagaagagaggaacagatgcttgcttgaagacctacaatgccctgaacaccagaggggtgtggttgtgcatatacattttataaataagacaaagaaaggataagtagcttgacctggaccatatagcaaatgacatcaggactggaattcatcctcagttatattctccaaagaaaaatgcccttcccttagctcaaataatttaaagtgttcaattctgagatcatgttcccccaaaattctgttgttataataatggctttatcacagaactaccaaagcatttgaagtctctctctatccctcccctctctctattcatgttaagcataatcatgtatactcatgtgagcatgtacgtatggaagccagtggtcaatcatgggtcatcctcagggcggtccatcttgttatagttttggtctatttttttgttttgagaaagagtatcacactagggcctgaggcttgctaattagggtaaactgactgtgatctgcctgccctatcttcccagcactgggactatgaatcccagctttttacatgagtgctagaatgcaaactttaccaaatgaggcttcacaccatcccccacaatgttttaaagtacccattaatgattgctcttcaaaattatgctttcaaaagtacaacatctattattaatttttgagattttattatatgtatacaatgataatactcaaccaccactcaaagtatcctttgctgtgacaagatcaaacactgagaatcccaggttacgcactcatatttctttgtaattttgtaagtctataagctaccacactctgcaagtcagtgtgctttggttttcctggaaagtgagaaatcttgggcctcccaagtgagttcacagactatagtcctcagcatccagataaaggtgagtggagaagagagtcaaaagtccctaattcaagagcattgtgaatgtttacaggtagaccaaaggaaacactattgttcagcctgtttactactgtctctattacttgctacatgtggaaagaggactacggtactggatcaaggagttctccaaactatcctcattaacttatcacctgatacctagcagatcgaaattctagtcattatccctcaggagttcatttgaggaattctggggacactaaacgacaaagtattagtactcttcagtctaaccactgacactattaactattgcactttatttagttttatatgcatggtgtgtgcatttgtgggcatgggtatgtgtgcatgtgtgtgcatatgtttgtagaagacagagggcaacattaggtattatcttcaatccctgtccaccttacattgaaataaggtctctcactggagtgcagctcaattctgctaggctgaccagcattacttttggatatttgccccttccagtcctgcagtcctgggattatgtacttttctgtgggtgtccagcatctaaacttgtcttcacatttttgcagctagcactttatcaactgattcatcttcccaacaccttactattaggtattttccatatttaaacttaatgttataatttcttgggggtggggacaaagcaagtggacaacaacttttataatgcccctgcaacctcttctgacattcagcaaagccaggaacctaggacccatgtttcagtcactattatttggtgtttcagtcactattatttgtgttagtgctgacaaaaattgccctttgtgaagaaataaacaagcatctttttatgataagtgtgacttatctgtaaagaagagattaagggttattgtaatgaatctaccttaatagtggcaacaatgagggcactacttgacacaagtttaataaatcctgtcacatgtggagaacactattaaaatgtcaagtgaacggaacacagtgaaacaaatcgaggaccacagcccttagaggagctccgttctttaactcagtcctctctttactcttttcctttccagtgtatggtgttgaaactgagatgctttcccccatcatagcttttggtcaacatagaaaacaaatatgaaatcctgacagtcacacttatgcccaggaagtcagcaacgtggtctctactacattcatttacttatgcaaccatttcttttcagggtcatgatcagtgtgaaacgcttggctacttgacatcattagtatagggctaattaaattataccctttgtattctatacttcaaactttggccaacatggaaagaggctaatctgtaaggaaggtggaagttcttgaaaacaaaaaaaaagaaactcatataatacaagcacttgtctcctcattttgtcccactgggtatgctctaacacactctggagagatgagtttctttttctcctttttttttattagaaagaaaattattttacatatcaatcccaggtccctctccctccccttctcccctgccccccccaactaacgccctacctatcccatatgctttctgctccccagggttggtgaggccttccataaggggtcttcaaagtctgtcatactctttggaatagggcctaggtcaacccccttgtgtctaggctcagggagtatccctccatgtgggatgggctcctaaagtccatttttatggtagccataaggagagatgagtttctttctccagcttgggaaaatctacctgtgtatagtctatactcctggtttgttttttaacttataaactgcatagctcattgcttttagctccgtcctgttttcattgaaaaatccatttcaccgagtaaaatcaagatggcttcaaattagtgatggttgggattcttcagagtcattgacaaaaaccttttaagcacatattaatttccaaaggccacctgtattgtctatataaactgtttctaccattgtcatgattttatcatgcaatgaccactctggcccaatcatccttaagcacagtgatcctgtctttgctctgggttttaacagctttttatagacagacattttagaattaaatgaaactttcctctaaatcactttgcttacagtaggcactgttctctactattagccatttccaatttcccaccaaaaagaaagatagagaacccatattatttaaacaaaggaaaaggttccaggaacctccaatatacaaatgtcagaaatgaaagtcatggaaataaaatgccctgaccaaactgctcagatatcaagaagtatccagacctggaaaccatatcttacatcaagtaatgcaggcttctgcccattagctcaaatagcttcattttctctttgcatgttttatgcctttaaaaaaaagttatatgtagagcaactcagcagagtagagaaaattctagaagccaaaaaacctagtttttaaaccctcaagcaaatgagatctttttgcctcattctctgtgatagcataacataattctatgaaatctctttggtaaatcaaaaaatatctacatacagtttagtacaaacaagatctcattgggccttgtctgtaacccctcaggcctcctggtcaatcaacatgaacacatctttagttcttggggcaaagtttcacacttgccatttctcagttttaagttgttgctctcaactcagaaactgagataaaaacatttctcccagtgtaagtgtctcagactatccccacctttatcccagaggtgctaagatgatggaatgcatgtacatacaaccaagactagggcagccaaggtcacttggcttctgaactgcagacatggattgtgattaaatggcaagatgatgacaatgactgtctaatcttgatgtctaagaacatgaatctttcagcacttggaccacttcatttttctccttagaataggatcactgtcatttggcctggaggacttttttttttctattttccaaaaaatgtaggcaacccatggtccatatggcaaaatataacagctacctagaaacaagtaacaagcgatgaatcaagttttgaactagcacctagaatttatcatactctctgccccctcccaaaacaagctcagaaaaccgtcctcatactaaagaggaagatagctctcagggtttcatatgctggttagctattttccaactttctgatgattcctttgatcagtggtgataagccccactaaaatcatcacattgctgctatgactaattccataagcattctcaaataaagccaattgaccattaaactgctctcactgtggcctaattcttaactgattgacagccaaagaaaggtcattgatcacaaacatacactctgaaatgttgagagagaaaaaaaaaatcacatggcgcacactgcctcatttggtagcttgggtttacagttcctcttctttctttgtctttcttttttttttttaattcaaaggccatgaatgcagatagcttttcagttgtccttgtgttttcctggctgaaagcaccctgtaagccctctcgaaatagatgagtagctgaaacaattgcatcttttcaaccctgatctcaacccatctaagattttgatgagctgcatacatccagcaaattttaaggaatagtggtccttcagtttctaaagtcttttcagagcacaaaccccatgcttgcactttgctttgcacggttctgctcattttcaggaaaaccatattttgcaccatatcctcacatattgatatgttgaggaaataaacagcaaacatcacttcccatccatctgctaagcttgttagaaggatgaacacagtgttcagatgtttttcactcaggtctcaaattccatattcaacataatttgcttttacttttcaaggcaaatcttaagccagttagatgaaatttggttcttctcttaaaaattaataatagtaataaggtagaagccatgttggatattgtcaagatatttctacctccaggctgctgtagagactcttaacaaaagacagtttgctctattttcctatgaaaaaaaatagcagttactgctcatttactgatgatgtaaatcaaagtcccggaagacatacttaatctatcattcctaacaaactgttttcaaaagatctttatactaatccatcagtacccagaattacacaagctctgcctgagttgcaaatattttaaaagcttgaagcaaagcaataaaagtcaattgaacaagcaaatctttggcagtcgtggtacccactggaaactgagccaaatgctgttgtgcaaaaggcaatgggaacggaaagggccgaagtccttagacttgtccctcttactgtttctgctttgccttctaattataatgacagttcttcagggagaactatgacctgtaatacactcttcatatcataaatgtaggattgatgattttgcaagctgcacttcaaaggacaagaaaaacagcaatgaacaataaaattgtttatcaagtaacagctaagcagacagctgagaacttctaagttatatcaaagataaaccattgaaagatcctgaagagcaaactgaaagttctttactgatgtcagttttaatttctttgtgtgataccaagatgaccccattatatatctatttcttcccaataatagggatgaaacccagggttttgcatatgttggtaagatatattcccagtccaatataaatatattaaaatcctttagttttaatattaacatgaagaatcttagtagagtcagtacaaactaatctacttcttttaaaattcaatatatcaaattttgtcaaggggcaacagctcctggaattatcaaatgattacaggagccattgtgtggtcttagcaaagaagcaaagactatgagggaacagaatttggagcaggagagggttacgaagagggtctacggttcagcgagtctcatactatcacatgtgccagatctctaggaattcccacaagactgactctgaattgcaggtctgtcatgaaagcacacacacacatccaactagctccatgggagctagtgctgctacttgctggaccacattttaagtagccagtgtctatagcccaagccctagaatttgaaattttcacaatgtgaaactattgcctatggagaaaataacctttttttctataataattggtaggtgtgtgcttgtgtgtggtttcagagatagccactttgtattagataaccaattaagggctcatctctggaagaaactgatttgacttcttagttgcttagttctttgattagggttgggacccaggtgcgtgcgttcgtgcgtgtgtgtgcttgtgtgtggtttcagagctagccactttgtattagataaccaattaagggctcatctctggaagaagctgatttgacttcttagttgcttagttctttgattagggttgggaccca

(The sequence listing continues in the following parts.)
